(19) United States
(12) Patent Application Publication
(10) Pub. No.: US 2006/0183128 A1
(43) Pub. Date: Aug. 17, 2006

(54) Methods and compositions for differentiating tissues for cell types using epigenetic markers

(75) Inventors: Kurt Berlin, Stahnsdorf (DE); Alexander Olek, Berlin (DE); Stephan Beck, Cambridge (GB); Thomas Hildmann, Berlin (DE); Joern Lewin, Berlin (DE); Karen Novik, North Vancouver (CA)

Correspondence Address: DAVIS WRIGHT TREMAINE, LLP, 2600 CENTURY SQUARE, 1501 FOURTH AVENUE, SEATTLE, WA, 98101-1688, US

(73) Assignee: Epigenomics AG, Berlin (DE)

(21) Appl. No.: 10/641,321

(22) Filed: Aug. 12, 2003

(51) Int. Cl. C12Q 1/68; C12P 19/34

(52) U.S. Cl. 435/6; 435/91.2

(57) ABSTRACT

The present invention provides, inter alia, a method for generating a genome-wide epigenomic map, comprising a correlation between methylation variable CpG positions (MVP) and genomic DNA sample types. MVP are those CpG positions that show a variable quantitative level of methylation between sample types. Particular genomic regions of interest (ROI) provide preferred marker sequences that comprise multiple, and preferably proximate MVP, and that have novel utility for distinguishing sample types. The epigenic maps have broad utility, for example, in identifying sample types, or for distinguishing between and among sample types. In a preferred embodiment the epigenomic map is based on methylation variable regions (MVP) within the major histocompatibility complex (MHC), and has utility, for example, in identifying the cell or tissue source of a genomic DNA sample, or for distinguishing one or more particular cell or tissue types among other cell or tissue types. Analysis of epigenetic characteristics of one, or of a set of nucleic acid sequences, in the context of an inventive epigenomic map, allows for the determination of an origin of the nucleic acids.

### FIELD OF THE INVENTION

[0001] The invention relates to the field of molecular diagnostic markers, and novel method for generating a genome-wide epigenomic map, comprising a correlation between methylation variable CpG positions (MVP) and genomic DNA sample types. The inventive epigenic maps have broad utility, for example, in identifying sample types, or for distinguishing between and among sample types. In particular preferred embodiments, the invention describes novel epigenetic characteristics of nucleic acid sequences derived from the major histocompatibility complex (MHC) and use of such markers to identify and/or differentiate tissues or cell types.

### SEQUENCE LISTING

[0002] A Sequence Listing, pursuant to 37 C.F.R. § 1.52(e)(5), has been provided on compact disc (1 of 1) as a 6.105 MB file, entitled 47675-49.txt, and which is incorporated by reference herein in its entirety.

### BACKGROUND

[0003] Genomic methylation. The genome contains approximately 40 million methylated cytosine (5-methylcytosine) bases, otherwise referred to herein as “fifth” bases, which are followed immediately by a guanine residue in the DNA sequence, with CpG dinucleotides comprising about 1.4% of the entire genome. An unusually high proportion of these bases is located in the regulatory and coding regions of genes. Methylation of cytosine residues in DNA is currently thought to play a direct role in controlling normal cellular development. Various studies have demonstrated that a close correlation exists between methylation and transcriptional inactivation. Regions of DNA that are actively engaged in transcription, however, lack 5-methylcytosine residues.

[0004] Methylation patterns, comprising multiple CpG dinucleotides, also correlate with gene expression, as well as with the phenotype of many of the most important common and complex human diseases. Methylation positions have, for example, not only been identified that correlate with cancer, as has been corroborated by many publications, but also with diabetes type II, arteriosclerosis, rheumatoid arthritis, and disease of the CNS. Likewise, methylation at other positions correlates with age, gender, nutrition, drug use, and probably a whole range of other environmental influences. Methylation is the only flexible (reversible) genomic parameter under exogenous influence that can change genome function, and hence constitutes the main (and so far missing) link between the genetics of disease and the environmental components that are widely acknowledged to play a decisive role in the etiology of virtually all human pathologies that are the focus of current biomedical research.

[0005] Methylation plays an important role in disease analysis because methylation positions vary as a function of a variety of different fundamental cellular processes. Additionally, however, many positions are methylated in a stochastic way, that does not contribute any relevant information.

[0006] Methylation content, levels, profiles and patterns. Genomic methylation can be characterized in distinguishable terms of methylation content, methylation level and methylation patterns. “Methylation content,” or “5-methylcytosine content,” as used herein refers to the total amount of 5-methylcytosine present in a DNA sample (i.e., a measure of base composition), and provides no information as to distribution of the fifth bases. Methylation content of the genome has been shown to differ, depending on the tissue source of the analyzed DNA (Ehrlich M, et al., Nucleic Acids Res. 10:2709, 1982). However, while Ehrlich et al showed tissue- and cell specific differences in methylation content among seven different normal human tissues and eight different types of homogeneous human cell populations, their analysis was neither specific with respect to particular genome regions, nor with respect to particular CpG positions. No genes or CpG positions were selected for the analysis, or identified by the analysis that could serve as markers for tissue or cell identification. Rather, only the level of the overall degree of genomic methylation (methylation content) was determined.

[0007] “Methylation level” or “methylation degree,” by contrast, refers to the average amount of methylation present at an individual CpG dinucleotide. Measurement of methylation levels at a plurality of different CpG dinucleotide postions creates either a methylation profile or a methylation pattern.

[0008] A methylation profile is created when average methylation levels of multiple CpGs (scattered throughout the genome) are collected. Each single CpG position is analyzed independently of the other CpGs in the genome, but is analyzed collectively across all homologous DNA molecules in a pool of differentially methylated DNA molecules (Huang et al., in The Epigenome, S. Beck and A. Olek, eds., Wiley-VCH Weinheim, p 58, 2003).

[0009] A methylation pattern, by contrast, is composed of the individual methylation levels of a number of CpG positions in proximity to each other. For example, a full methylation of 5-10 closely linked CpG positions may comprise a methylation pattern that, while rare, may be specific for a specific DNA source.

[0010] Prior art correlations involving DNA methylation. A correlation of individual gene methylation patterns with specific tissues has been suggested in the art (Grunau et al., Hum. Mol. Gen. 9:2651-2663, 2000). However, in this study, methylation patterns of only four specific genes were analyzed in tissues from only two different individuals, and the aim of the study was to analyze the correlation between known gene expression levels and their respective methylation patterns.

[0011] Adorjan et al published data indicating that tissues such as prostate and kidney could be distinguished by means of methylation markers (Adorjan et al., Nuc. Acids Res. 30: e 21, 2002). This study identified tumor markers, based on analysis of a large number of individuals (relatively large number of samples). Several CpG positions were identified that could be utilized as markers in an appropriate methylation assay to differentiate between kidney and prostate tissue, regardless of the tissue status as being diseased or healthy.

[0012] However both the Grunau et al., and Adorjan et al studies offer only a very limited selection of markers to detect a very small proportion of the many known different cell types.

[0013] Likewise, patent application WO 03/025215 to Carroll et al., for example, provides a method for creating a map of the methylome (referred to as “a genomic methylation signature”), based on methylation profile analyses, and employing methylation-sensitive restriction enzyme digests and digest-dependant amplification steps. The method description alleges to combine methylation profiling with mapping. This attempt is, however, severely limited for at least three reasons. First, the prior art method provides only a ‘yes or no’ qualitative assessment of the methylation status (methylated or unmethylated) of a cytosine at a genomic CpG position in the genome of interest.

[0014] Second, the method of Carroll et al is labor intensive, not being adaptable for high throughput, because it requires a second labor intensive step; namely, after completing the process of restriction enzyme-based methylation analysis to identify a particular amplificate as a potential methylation marker, each of these amplified digestion dependent markers (amplficates) needs to be cloned and sequenced for mapping to the genome.

[0015] Third, there are no means described by Carroll et al for utilizing the generated information as tissue markers. Specifically, while Carroll et al disclose that specific different tissues of mice have different ‘methylomes’ (WO 03/025215, FIG. 6), and that two different human tissues, sperm cells and blood cells, could be correlated with differing amplification profiles (Id, FIGS. 4 and 10, where CpG positions were identified that were unmethylated in one scenario and methylated in the other), there is no means or enablement to support use of this information as a specific tissue marker.

[0016] Prior art methods for determining tissue type that are based on protein or mRNA expression are limited by intrinsic disadvantages.

[0017] Protein expression-based prior art approaches. Immuno-histochemical assays are utilized as standard methods to determine a cell type or a tissue type of cellular origin in the context of an intact organism. Such methods are based on the detection of specific proteins. For example, the German Center for collection of microorganisms and cell cultures (DSMZ) routinely tests the expression of tissue markers on all arriving human cell lines with a panel of well-characterized monoclonal antibodies (mAbs) (Quentmeier H, et al., J Histochem. Cytochem. 49:1369-1378, 2001). Generally, the expression pattern of histological markers reflects that of the originating cell type. However, expression of the proteins, carbohydrate or lipid structures that are detected by individual mAbs, is not always stable over a long period of time.

[0018] Likewise, immunophenotyping, which can be performed both to confirm the histological origin of a cell line, and to provide customers with useful information for scientific applications, is based on testing the stability and intensity of cell surface marker expression. Immunophenotyping typically includes a two-step staining procedure, wherein antigen-specific murine mAbs are added to the cells in the first step, followed by assessment of binding of the mAbs by an immunofluorescence technique using FITC-conjugated anti-mouse Ig secondary antisera. Distribution of antigens is analyzed by flow cytometry and/or light microscopy.

[0019] A number of proteins appear to be expressed in a tissue- or organ-specific manner. However, not only is their use as markers restricted to the rather labor-intensive procedure of immunostaining, but these methods also limited by a requirement for intact cells and a sufficient amount of tissue material or cells, in a non-degraded/non-denatured state. With respect to serum, proteins, as well as RNAs, that are “exogenous” to the blood stream will be degraded fast and therefore are not adequately available in many instances for determination of the respective tissues of origin.

[0020] Additionally, one assay per protein is required to monitor the expression of the proteins. Therefore the process of determining a cell type or tissue type using these expression-based methods is not trivial, but rather complex. The more marker proteins are known the more precisely a cell's status of origin can be determined. Without the use of molecular biology techniques, such as RNA-based cDNA/oligo-microarrays or a complex proteomics experiment, which enable the simultaneous view of a higher number of changes, the identification of a specific cell type would require a sequence of tedious and time-consuming assays to detect a rather complex protein expression pattern. Finally, proteomic approaches have not overcome basic difficulties, such as reaching sufficient sensitivity.

[0021] RNA expression-based prior art approaches. RNA-based techniques to analyze expression patterns are well-known and widely used. In particular, microarray-based expression analysis studies to differentiate cell types and organs have been described, and used to show that precise patterns of differentially expressed genes are specific for a particular cell type.

[0022] A system of cluster analysis for genome-wide expression data from DNA microarray hybridization is described by Eisen et al. Proc. Natl. Acad. Sci. USA. 95:14863-8, 1998. Eisen et al teach clustering of gene expression data groups together, especially data for genes of known similar function, and interpretation of the patterns found as an indicator of the status of cellular processes. However, the teachings of Eisen are in the context of yeast and, therefore, cannot be extended to identify tissue or organ markers useful in human beings or other more developmentally complex organisms and animals. Likewise such teachings cannot be extended into the area of human disease prognostics and diagnostics.

[0023] Similarly, Ben-Dor et al describe an expression-based approach for tissue classification in humans. However, as in nearly all related publications, the scope is limited to markers for the identification of tumors (Ben-Dor et al. J Comput Biol. 7: 559-83, 2000).

[0024] Likewise, Enard et al. recently published a comparative analysis of expression patterns within specific tissue samples across different species, teaching different mRNA and protein expression patterns between different individuals of one species (intra-specific variation), as well as between different species (inter-specific variation). Enard et al did not however, teach or enable use of such expression levels for distinguishing between or among different tissues.

[0025] Both cDNA arrays and oligonucleotide-based-chips (e.g., Affymetrix™ chips) allow a complex and sensitive analysis of changes in the expression pattern of cells. However, the substantial drawback of these technologies is their dependency on RNA. Despite extensive research with RNA, the general problem of its instability is still not solved, and each single experiment with RNA must account for RNA degradation during the experimental procedure. This problem is aggravated by the fact that RNA expression levels change gradually, so that for the majority of genes, the actual expression changes are overlapping and blurred, because of random degradation.

[0026] Lack of acceptance of prior art methods by regulatory agencies. Significantly, regulatory agencies are currently not willing to accept a technology platform relying on an expression microarray due to the above-described shortcomings.

[0027] U.S. Pat. No. 6,581,011 to TissueInformatics Inc., teaches a tissue information database for profiling and classifying a broad range of normal tissues, and illustrates the need in the art for tools allowing classification of a tissue.

[0028] Prior art ‘tumor marker’ gene approaches. More and more nucleic acid-based assays are developed today for detecting the presence or absence of known tumor indicating proteins in blood or other bodily fluids, or of mRNAs of known tumor related genes; so-called tumor marker genes. Such assays are distinguished from those based on screening DNA for mutations indicative of hereditary diseases, wherein not only mRNA but also genomic DNA can be analyzed, but wherein no information can be gathered on the actual condition of the patient.

[0029] For detection of acute disease status using marker gene approaches, the analyzed DNA must be derived from a diseased cell, such as a tumor cell. The detection of cancer specific alterations of genes involved in carcinogenesis (e.g., oncogene mutations or deletions, tumor suppressor gene mutations or deletions, or microsatellite alterations) facilitates determining the probability that a patient carries a tumor or not (e.g., WO 95/16792 or U.S. Pat. No. 5,952,170 to Stroun et al.). Kits, in some instances, have been developed that allow for efficient and accurate screening of multiple samples. Such kits are not only of interest for improved preventive medicine and early cancer detection, but also utility in monitor a tumors progression/regression after therapy.

[0030] Marker gene hypermethylation. Hypermethylation of certain ‘tumor marker’ genes, especially of certain promoter regions thereof, is recognized as an important indicator of the presence or absence of a tumor. Significantly, however, such prior art methylation analyses are limited to those based on determination of the methylation status of known marker genes, and do not extent to genomic regions that have not been previously implicated based on function; ‘tumor marker’ genes are those genes known to play a role in the regulation of carcinogenesis, or are believed to determine the switching on and off of tumorigenesis.

[0031] Knowledge of the correlation of methylation of tumor marker genes and cancer is most advanced in the case of prostate cancer. For example, a method using DNA from a bodily fluid, and comprising the methylation analysis of the tumor marker gene GSTP1 as an predictive indicator of prostate cancer has been patented (U.S. Pat. No. 5,552,277).

[0032] Significantly, prior art tumor marker screening approaches are limited to certain types of diseases (e.g., cancer types). This is because they are limited to analysis of marker genes, or gene products which are highly specific for a kind of disease, mostly being cancer, when found in a specific kind of bodily fluid. For example, Usadel et al. teach detection of a tumor specific methylation in the promoter region of the adenomatous polyopsis coli (APC) gene in serum samples of lung cancer patients, but that no methylated APC promoter DNA is detected in serum samples of healthy donors (Usadel et al. Cancer Research 6:371-375, 2002). This marker thus qualifies as a reasonable indicator for lung cancer, and has utility for the screening of people diagnosed with lung cancer, or for monitoring of patients after surgical removal of a tumor for developing metastases in their lung.

[0033] Moreover the teachings of Usadel et al are also limited by the fact that the epigenetic APC gene alterations are not specific for lung cancer, but are common in other cancer, for example, in gastrointestinal tumor development. Therefore, a blood screen with only APC as a tumor marker has limited diagnostic utility to indicate that the patient is developing a tumor, but not where that tumor would be located or derived from. Consequently, a physician would not be informed with respect to a more detailed diagnosis of an specific organ, or even with respect to treatment options of the respective medical condition; most of the available diagnostic or therapeutic measures will be organ- or tumor source-specific. This is particularly true where the lesion is small in size, and it will be extremely difficult to target further diagnostics and therapies.

[0034] Given the nature of marker genes as previously implicated genes, prior art use of marker genes for early diagnosis has occurred where a specific medical condition is already in mind. For example, a physician suspicious of having a patient with a developed a colon cancer, can have the patient stool sample tested for the status of a cancer marker gene like K-ras. A patient suspected as having developed a prostate cancer, may have his ejaculate sample tested for a prostate cancer marker like GSTPi.

[0035] Significantly, however, there is no prior art method described for efficient and effective generally screening of patients, or bodily fluids thereof, where the patient has no specific prior indication or suspicion as to which organ or tissue might have developed a cell proliferative disease (e.g., an individual previsously exposed to a high level of radiation). In particular cases, the use of appropriate tissue specific markers however, may allow this kind of diagnosis (e.g., application PCT/EP03/02245 by Berlin and Sledziewski; teaches a method comprising performing methylation on nucleic acid samples isolated from bodily fluids, and wherein an increased level of circulating nucleic acids is detectable.

[0036] The major histocompatibility complex. The major histocompatibility complex (MHC) is essential to our immune system, and thus is associated with more diseases than any other region of the human genome. For example, factors affecting psoriasis, a common hereditary skin disease, are linked to the MHC. The primary immunological function of MHC molecules is to bind and ‘present’ antigenic peptides on the surfaces of cells for recognition (binding) by the antigen-specific T cell receptors (TCRs) of lymphocytes. Differential structural properties of MHC class I and class II molecules account for their respective roles in activating different populations of T lymphocytes; cytotoxic TC lymphocytes bind antigenic peptides presented by MHC class I molecules, whereas, helper TH lymphocytes bind antigenic peptides presented by MHC class II molecules.

[0037] The MHC is a region of a defined range, and as such is one of the best characterized regions in the human genome. Highly reliable sequence information is available throughout this range. It is not yet clear, however, which MHC regions might have utility for identification and/or distinguishing between or among disease states or conditions.

[0038] Inadequate genome-wide screening approaches. Unfortunately, prior art approaches to genome-wide assessment of CpG dinucleotides all employ the digestion of genomic DNA with methylation-sensitive enzymes, thereby limiting analysis to sites for which methylation-sensitive enzymes are available. Most of these techniques are highly labor intensive and cannot be automated.

[0039] There is, therefore, a substantial need in the art for a high-throughput approach for efficiently screening the entire genome to assess the methylation status and level of the CpG positions within many genes in parallel.

[0040] There is a substantial need for methods that are based on the relatively stable DNA molecule, rather than on easily degradable RNA molecules, and that are more sensitive and reliable than those based on RNA-dependent technologies.

[0041] There is a need for diagnostic platforms that are likely to be accepted by regulatory authorities.

[0042] There is a substantial need in the art to know which positions in the genome contain disease- or condition-relevant information.

[0043] There is a substantial need in the art for a functional map of the ‘epigenome’, displaying the flexible level of higher chromatin organization, and the methylation patterns of genomic segments in relation to external (e.g., environmental) and internal (e.g., cell-type-specific) influences over the course of a human life.

[0044] There is a substantial need in the art, including from the clinical perspective, to identify cell or tissue type and/or cell or tissue source. For example, there is a need in the art for efficient and effective typing of disseminated tumor cells, for determining the tissue of origin (i.e., the type of tissue or organ the tumor was derived from).

[0045] No such tools or methods, apart from a few disclosed isolated markers, are available in the prior art. Likewise, no generally applicable prior art methods are available for determining the cell- or tissue-type from which a genomic DNA sample was derived.

[0046] There is a need in the art for epigonomic methods comprising quantified methylation levels.

### SUMMARY OF THE INVENTION

[0047] Particular embodiments of the present invention disclose a method for constructing a functional map of the ‘epigenome.’ Analysis of gene expression (e.g., of RNA, cDNA or protein) is not a requirement for creating the epigenome map, as described and taught herein.

[0048] Analysis of genomic DNA bears the advantage of being a reliable method based on a rather robust material, that is much less sensitive to temperature changes and other environmental influences. For example, it is possible to detect genomic DNA derived from a certain organ in the blood stream or other bodily fluids of an individual, wherein they might indicate a disease at the tissue of origin. Accordingly, embodiments of the present invention are based on the relatively stable DNA molecule, rather than on easily degradable RNA molecules, and depends on a digital (0/1) signal (reflecting a binary base status being either methylated or not). Therefore, the present methods are more sensitive and reliable than those based on RNA-dependent technologies. Platform based on the present technology are likely to be accepted by regulatory authorities.

[0049] The present invention provides novel methods not only for determining qualitative information for generating methylaion profiles, but also for determining quantitative methylation patterns. The inventive methods provide quantitative information on methylation levels of cytosines at CpG positions within the genome of interest. Such quantitative methods are lacking in the prior art.

[0050] In particular embodiments, the invention provides a method for generating quantitative (absolute) methylation level values within a matrix, the matrix comprising along one axis a complete listing of all CpG positions within the human genome, and along another axis a complete listing of all cellular variables or indicia, including but not limited to, cell type, external influences (e.g., environmental influences), age, tissue source type, etc. along the other axis. The field encompassed by these axes is the methylation map of the epigenome (i.e., functional epigenomic map). In preferred exemplary embodiments, a method for generating methylation level values within a sub-matrix comprising all MHC CpG positions, or comprising the CpG positions of particular MHC subregions is provided, said sub-matrices having utility, inter alia, for identifying cell or tissue type, and/or for distinguishing among different cell or tissue types of the respective genomic DNA sources.

[0051] According to the present invention, methylation analysis at specific CpG positions allows the determination of the cell- or tissue-type of DNA origin, allowing initiation of further examination for determination of the right treatment in an accurate and efficient manner; particularly crucial where the disease is cancer.

[0052] The present invention provides, in particular embodiments, a method to identify a large number of markers, covering the entire genome. The basic method comprises, in particular embodiments, establishing ‘absolute’ values of methylation levels that can be compared across different DNA amplificates and different samples, allowing for a comparison of DNA methylation data corresponding to a diversity of genomic DNA sources and conditions (e.g., corresponding to different isolation methods, different efficiencies of bisulfite pretreatment of the DNA, different amplification/PCR conditions (e.g., different tubes, etc.)).

[0053] The present invention provides not only a method for the comprehensive identification of those regions in the genome that after pretreatment become useful markers, but also provides the tools (e.g., the marker nucleic acids and their tissue specific methylation patterns), to identify the organ, tissue or cell type source of the analyzed genomic DNA.

[0054] A particularly preferred exemplary embodiment provides a functional map of the major histocompatibility complex (MHC) epigenome, based on a correlation of genomic DNA methylation state or methylation level of particular marker regions with the tissue source of the DNA (i.e., tissue or cell specificity of DNA methylation; differential methylation), rather than on a correlation with environmental influences, like the difference between smoking and non-smoking cell donors. Internal influence in this aspect of the invention relates to the triggers and circumstances that determine a cell's development or differentiation towards a specific cell or tissue type. The method itself however is not limited in utility to tissue differentiation, but is useful to identify marker sequences for all kinds of cell classifications, internal and external.

[0055] In a preferred exemplary embodiment described herein, the inventive methods are applied to the human major histocompatibility complex (MHC) region of the genome in screening for tissue-specific markers; that is, for nucleic acid sequences that serve as markers for a specific cell type when used in an appropriate assay according to the present invention. According to the present invention, particular regions of the MHC have been identified that have substantial utility as markers, including as tissue-specific markers.

[0056] Specifically, The present invention provides a method for generating a genome-wide methylation map, comprising: obtaining, for each of at least two biological sample types, a plurality or group of biological samples having genomic DNA; pretreating the genomic DNA of the samples by contacting the samples, or isolated DNA from the samples, with an agent, or series of agents that modifies unmethylated cytosine but leaves methylated cytosine essentially unmodified; amplifying segments of the pretreated DNA, said amplified segments representing the entire genome, or a portion thereof, and comprising in each case at least one dinucleotide sequence position corresponding to a CpG dinucleotide position in the corresponding untreated genomic DNA, and wherein said amplification is by means of primer molecules that do not comprise a dinucleotide sequence position corresponding to a CpG dinucleotide position in the corresponding untreated genomic DNA; sequencing the amplified pretreated nucleic acids; analyzing the sequences to quantify a level of methylation at specific CpG positions; comparing said quantified levels of methylation at specific CpG positions between the different sample groups corresponding to the at least two biological sample types; and identifying methylation variable positions, wherein a methylation variable position is a genomic CpG position, for which there is a detectable difference in the quantified level of methylation between different biological sample types, and whereby an epigenomic map over the entire genome, or a portion thereof is, at least in part, afforded.

[0057] Preferably, the biological sample type is of a tissue, organ or cell. Preferably, the dinucleotide sequence position corresponding to a CpG dinucleotide position in the corresponding untreated genomic DNA is a CpG or a TpG dinucleotide sequence position. Preferably, sequencing comprises generating a sequence trace, or electropherogram for use in quantifying the level of methylation. Preferably, analyzing the sequences in comprises creating a profile of the quantified level of methylation over the entire genome, or a portion thereof. Preferably, quantifying the level of methylation involves the use of a software program suitable therefore. Preferably, the suitable software program is ESME, which considers or accounts for an unequal distribution of bases in bisulfite converted DNA and normalizes sequence traces (electropherograms) to allow for quantitation of methylation signals within the sequence traces. Preferably, the agent, or series of agents comprises a bisulfite reagent. Preferably, the agent, or series of agents of b) comprises an enzyme. Preferably, pretreating comprises modification of cytosine to uracil. Preferably, amplifying segments comprises amplification of at least one segment located in, or comprising a regulatory region of a gene. Preferably,amplifying in c) comprises use of a polymerase chain reaction (PCR).

[0058] Additional embodiments provide a nucleic acid or an oligomer comprising at least one contiguous base sequence having a length of at least 16 nucleotides that is complementary to, or hybridizes under moderately stringent or stringent conditions to a pretreated genomic DNA sequence selected from the group consisting of SEQ ID NOS:1-136, and sequences complementary thereto, wherein said contiguous sequence comprises at least one methylation variable position, or at least one CpG, tpG, or Cpa dinucleotide sequence, and wherein pretreatment comprises treating the genomic DNA with an agent, or series of agents, that modifies unmethylated, but leaves methylated, cytosine essentially unmodified.

[0059] Further embodiments provide a set of oligomers, said set comprising a first oligomer and a second oligomer, wherein the first oligomer, and the second oligomer each comprises at least one contiguous base sequence of at least 16 nucleotides in length that is complementary to, or hybridizes under moderately stringent or stringent conditions to a pretreated genomic DNA sequence selected from, in the case of the first oligomer, a first sequence group consisting of SEQ ID NOS:1-136, and selected from, in the case of the second oligomer, a second sequence group consisting of sequences complementary to the sequences of the first sequence group, and wherein pretreatment comprises treating the genomic DNA with an agent, or series of agents, that modifies unmethylated, but leaves methylated, cytosine essentially unmodified. Preferably, the set is suitable for use in generating nucleic acid amplificates.

[0060] Yet further embodiments provide a nucleic acid or oligomer, comprising a sequence selected from the group consisting of SEQ ID NOS:137 through 204 and SEQ ID NOS:206 through 221.

[0061] Additional embodiments provide a nucleic acid or an oligomer comprising at least one contiguous base sequence having a length of at least 16 nucleotides that is complementary to, or hybridizes under moderately stringent or stringent conditions to a pretreated genomic DNA sequence selected from a group consisting of SEQ ID NOS:1, 2, 69, 70; SEQ ID NOS:3, 4, 71, 72; SEQ ID NOS:5, 6, 73, 74; SEQ ID NOS:7, 8, 75, 76; SEQ ID NOS:9, 10, 77, 78; SEQ ID NOS:11, 12, 79, 80; SEQ ID NOS:13, 14, 81, 82; SEQ ID NOS:15, 16, 83, 84; SEQ ID NOS:17, 18, 85, 86; SEQ ID NOS:19, 20, 87, 88; SEQ ID NOS:21, 22, 89, 90; SEQ ID NOS:23, 24, 91, 92; SEQ ID NOS:25, 26, 93, 94; SEQ ID NOS:27, 28, 95, 96; SEQ ID NOS:29, 30, 97, 98; SEQ ID NOS:31, 32, 99, 100; SEQ ID NOS:33, 34, 101, 102; SEQ ID NOS:35, 36, 103, 104; SEQ ID NOS:37, 38, 105, 106; SEQ ID NOS:39, 40, 107, 108; SEQ ID NOS:41, 42, 109, 110; SEQ ID NOS:43, 44, 111, 112; SEQ ID NOS:45, 46, 113, 114; SEQ ID NOS:47, 48, 115, 116; SEQ ID NOS:49, 50, 117, 118; SEQ ID NOS:51, 52, 119, 120; SEQ ID NOS:53, 54, 121, 122; SEQ ID NOS:55, 56, 123, 124; SEQ ID NOS:57, 58, 125, 126; SEQ ID NOS:59, 60, 127, 128; SEQ ID NOS: 61, 62, 129, 130; SEQ ID NOS:63, 64, 131, 132; SEQ ID NOS:65, 66, 133, 134 and SEQ ID NOS:67, 68, 135, 136, and sequences complementary thereto, wherein said contiguous sequence comprises at least one methylation variable position, or at least one CpG, tpG, or Cpa dinucleotide sequence, and wherein pretreatment comprises treating the genomic DNA with an agent, or series of agents, that modifies unmethylated, but leaves methylated, cytosine essentially unmodified.

[0062] Additional embodiments provide a set of oligomers, said set comprising a first oligomer and a second oligomer, wherein the first oligomer, and the second oligomer each comprises at least one contiguous base sequence of at least 16 nucleotides in length that is complementary to, or hybridizes under moderately stringent or stringent conditions to a pretreated genomic DNA sequence selected from, in the case of the first oligomer, a sequence subgroup selected from a first group of 4-sequence subgroups consisting of SEQ ID NOS:1, 2, 69, 70; SEQ ID NOS:3, 4, 71, 72; SEQ ID NOS:5, 6, 73, 74; SEQ ID NOS:7, 8, 75, 76; SEQ ID NOS:9, 10, 77, 78; SEQ ID NOS:11, 12, 79, 80; SEQ ID NOS:13, 14, 81, 82; SEQ ID NOS:15, 16, 83, 84; SEQ ID NOS:17, 18, 85, 86; SEQ ID NOS:19, 20, 87, 88; SEQ ID NOS:21, 22, 89, 90; SEQ ID NOS:23, 24, 91, 92; SEQ ID NOS:25, 26, 93, 94; SEQ ID NOS:27, 28, 95, 96; SEQ ID NOS:29, 30, 97, 98; SEQ ID NOS:31, 32, 99, 100; SEQ ID NOS:33, 34, 101, 102; SEQ ID NOS:35, 36, 103, 104; SEQ ID NOS:37, 38, 105, 106; SEQ ID NOS:39, 40, 107, 108; SEQ ID NOS:41, 42, 109, 110; SEQ ID NOS:43, 44, 111, 112; SEQ ID NOS:45, 46, 113, 114; SEQ ID NOS:47, 48, 115, 116; SEQ ID NOS:49, 50, 117, 118; SEQ ID NOS:51, 52, 119, 120; SEQ ID NOS:53, 54, 121, 122; SEQ ID NOS:55, 56, 123, 124; SEQ ID NOS:57, 58, 125, 126; SEQ ID NOS:59, 60, 127, 128; SEQ ID NOS:61, 62, 129, 130; SEQ ID NOS:63, 64, 131, 132; SEQ ID NOS:65, 66, 133, 134 and SEQ ID NOS:67, 68, 135, 136, and selected from, in the case of the second oligomer, a corresponding complementary sequence subgroup selected from a second group of 4-sequence subgroups consisting of sequences complementary to the respective subgroup sequences of the first sequence group, and wherein pretreatment comprises treating the genomic DNA with an agent, or series of agents, that modifies unmethylated, but leaves methylated, cytosine essentially unmodified. Preferably, the set is suitable for use in generating nucleic acid amplificates.

[0063] Yet additional embodiment provide a method for at least one of identifying liver cells, organ or tissue, distinguishing liver cells, organ or tissue from one or more other cell or tissue types, or identifying liver cells, organ or tissue as the source of a DNA sample, comprising: obtaining at least one cell, tissue, bodily fluid or other sample, wherein the sample comprises genomic DNA; determining, for the at least one sample and using a suitable assay, a methylation state or a level of methylation for at least one methylation variable position within a genomic DNA sequence selected from the group consisting of SEQ ID NO:205, a fragment thereof at least 16 contiguous nucleotides in length, and sequences that are complementary to, or hybridize under moderately stringent or stringent conditions to SEQ ID NO:205 or to a fragment thereof at least 16 contiguous nucleotides in length; and comparing said at least one methylation state or level of methylation with a suitable standard or control, or comparing said at least one methylation state or level of methylation between or among corresponding methylation variable positions of the samples, whereby at least one of identifying liver cells, organ or tissue, distinguishing liver cells, organ or tissue from one or more other cell, organ or tissue types, or identifying liver cells, organ or tissue as the source of a DNA sample is, at least in part afforded. Preferably, determining in b), comprises at least one of: use of one or more nucleic acid or oligomers comprising, in each case, at least one contiguous base sequence having a length of at least 16 nucleotides that is complementary to, or hybridizes under moderately stringent or stringent conditions to a pretreated genomic DNA sequence selected from a group consisting of SEQ ID NOS:1, 2, 69, 70; SEQ ID NOS:7, 8, 75, 76; SEQ ID NOS:9, 10, 77, 78; SEQ ID NOS:11, 12, 79, 80; SEQ ID NOS:13, 14, 81, 82; SEQ ID NOS:25, 26, 93, 94; SEQ ID NOS:27, 28, 95, 96; SEQ ID NOS:35, 36, 103, 104; SEQ ID NOS:37, 38, 105, 106; SEQ ID NOS:51, 52, 119, 120; SEQ ID NOS:53, 54, 121, 122; SEQ ID NOS:59, 60, 127, 128; and sequences complementary thereto; or use of a methylation-sensitive restriction enzyme on a genomic DNA sequence selected from the group consisting of SEQ ID NO:205 or a fragment thereof at least 16 contiguous nucleotides in length, and sequences that are complementary to, or hybridize under moderately stringent or stringent conditions to SEQ ID NO: 205 or a fragment thereof at least 16 contiguous nucleotides in length.

[0064] Additional embodiments provide a method for at least one of identifying brain cells, organ or tissue, distinguishing brain cells, organ or tissue from one or more other cell or tissue types, or identifying brain cells, organ or tissue as the source of a DNA sample, comprising: obtaining at least one cell, tissue, bodily fluid or other sample, wherein the sample comprises genomic DNA; determining, for the at least one sample and using a suitable assay, a methylation state or a level of methylation for at least one methylation variable position within a genomic DNA sequence selected from the group consisting of SEQ ID NO:205, a fragment thereof at least 16 contiguous nucleotides in length, and sequences that are complementary to, or hybridize under moderately stringent or stringent conditions to SEQ ID NO:205 or to a fragment thereof at least 16 contiguous nucleotides in length; and comparing said at least one methylation state or level of methylation with a suitable standard or control, or comparing said at least one methylation state or level of methylation between or among corresponding methylation variable positions of the samples, whereby at least one of identifying brain cells, organ or tissue, distinguishing brain cells, organ or tissue from one or more other cell, organ or tissue types, or identifying brain cells, organ or tissue as the source of a DNA sample is, at least in part afforded. Preferably, determining), comprises at least one of: use of one or more nucleic acid or oligomers comprising, in each case, at least one contiguous base sequence having a length of at least 16 nucleotides that is complementary to, or hybridizes under moderately stringent or stringent conditions to a pretreated genomic DNA sequence selected from a group consisting of SEQ ID NOS:3, 4, 71, 72; SEQ ID NOS:17, 18, 85, 86; SEQ ID NOS:19, 20, 87, 88; SEQ ID NOS:29, 30, 97, 98; SEQ ID NOS: 49, 50, 117, 118; SEQ ID NOS:57, 58, 125, 126; SEQ ID NOS:61, 62, 129, 130; SEQ ID NOS:67, 68, 135, 136; and sequences complementary thereto; or use of a methylation-sensitive restriction enzyme on a genomic DNA sequence selected from the group consisting of SEQ ID NO:205 or a fragment thereof at least 16 contiguous nucleotides in length, and sequences that are complementary to, or hybridize under moderately stringent or stringent conditions to SEQ ID NO:205 or a fragment thereof at least 16 contiguous nucleotides in length.

[0065] Still Additional embodiments provide a method for at least one of identifying breast cells, organ or tissue, distinguishing breast cells, organ or tissue from one or more other cell or tissue types, or identifying breast cells, organ or tissue as the source of a DNA sample, comprising: obtaining at least one cell, tissue, bodily fluid or other sample, wherein the sample comprises genomic DNA; determining, for the at least one sample and using a suitable assay, a methylation state or a level of methylation for at least one methylation variable position within a genomic DNA sequence selected from the group consisting of SEQ ID NO:205, a fragment thereof at least 16 contiguous nucleotides in length, and sequences that are complementary to, or hybridize under moderately stringent or stringent conditions to SEQ ID NO:205 or to a fragment thereof at least 16 contiguous nucleotides in length; and comparing said at least one methylation state or level of methylation with a suitable standard or control, or comparing said at least one methylation state or level of methylation between or among corresponding methylation variable positions of the samples, whereby at least one of identifying breast cells, organ or tissue, distinguishing breast cells, organ or tissue from one or more other cell, organ or tissue types, or identifying breast cells, organ or tissue as the source of a DNA sample is, at least in part afforded. Preferably, determining comprises at least one of: use of one or more nucleic acid or oligomers comprising, in each case, at least one contiguous base sequence having a length of at least 16 nucleotides that is complementary to, or hybridizes under moderately stringent or stringent conditions to a pretreated genomic DNA sequence selected from a group consisting of SEQ ID NOS:3, 4, 71, 72; SEQ ID NOS:5, 6, 73, 74; SEQ ID NOS;15, 16, 83, 84; SEQ ID NOS:19, 20, 87, 88; SEQ ID NOS:21, 22, 89, 90; SEQ ID NOS:23, 24, 91, 92; SEQ ID NOS:29, 30, 97, 98; SEQ ID NOS:39, 40, 107, 108; SEQ ID NOS;41, 42, 109, 110; SEQ ID NOS;45, 46, 113, 114; SEQ ID NOS;63, 64, 131, 132; SEQ ID NOS:65, 66, 133, 134; SEQ ID NOS:67, 68, 135, 136; and sequences complementary thereto; or use of a methylation-sensitive restriction enzyme on a genomic DNA sequence selected from the group consisting of SEQ ID NO:205 or a fragment thereof at least 16 contiguous nucleotides in length, and sequences that are complementary to, or hybridize under moderately stringent or stringent conditions to SEQ ID NO:205 or a fragment thereof at least 16 contiguous nucleotides in length.

[0066] Additional embodiments provide a method for at least one of identifying muscle cells, organ or tissue, distinguishing muscle cells, organ or tissue from one or more other cell or tissue types, or identifying muscle cells, organ or tissue as the source of a DNA sample, comprising: obtaining at least one cell, tissue, bodily fluid or other sample, wherein the sample comprises genomic DNA; determining, for the at least one sample and using a suitable assay, a methylation state or a level of methylation for at least one methylation variable position within a genomic DNA sequence selected from the group consisting of SEQ ID NO:205, a fragment thereof at least 16 contiguous nucleotides in length, and sequences that are complementary to, or hybridize under moderately stringent or stringent conditions to SEQ ID NO:205 or to a fragment thereof at least 16 contiguous nucleotides in length; and comparing said at least one methylation state or level of methylation with a suitable standard or control, or comparing said at least one methylation state or level of methylation between or among corresponding methylation variable positions of the samples, whereby at least one of identifying muscle cells, organ or tissue, distinguishing muscle cells, organ or tissue from one or more other cell, organ or tissue types, or identifying muscle cells, organ or tissue as the source of a DNA sample is, at least in part afforded. Preferably, determining comprises at least one of: use of one or more nucleic acid or oligomers comprising, in each case, at least one contiguous base sequence having a length of at least 16 nucleotides that is complementary to, or hybridizes under moderately stringent or stringent conditions to a pretreated genomic DNA sequence selected from a group consisting of SEQ ID NOS:15, 16, 83, 84; SEQ ID NOS:19, 20, 87, 88; SEQ ID NOS:21, 22, 89, 90; SEQ ID NOS:27, 28, 95, 96; SEQ ID NOS:29, 30, 97, 98; SEQ ID NOS:43, 44, 111, 112; SEQ ID NOS:45, 46, 113, 114; SEQ ID NOS:47, 48, 115, 116; SEQ ID NOS:55, 56, 123, 124; SEQ ID NOS:57, 58, 125, 126; SEQ ID NOS:63, 64, 131, 132; and sequences complementary thereto; or use of a methylation-sensitive restriction enzyme on a genomic DNA sequence selected from the group consisting of SEQ ID NO:205 or a fragment thereof at least 16 contiguous nucleotides in length, and sequences that are complementary to, or hybridize under moderately stringent or stringent conditions to SEQ ID NO:205 or a fragment thereof at least 16 contiguous nucleotides in length.

[0067] Also provided is a method for at least one of identifying lung cells, organ or tissue, distinguishing lung cells, organ or tissue from one or more other cell, organ or tissue types, or identifying lung cells, organ or tissue as the source of a DNA sample, comprising: obtaining at least one cell, tissue, bodily fluid or other sample, wherein the sample comprises genomic DNA; determining, for the at least one sample and using a suitable assay, a methylation state or a level of methylation for at least one methylation variable position within a genomic DNA sequence selected from the group consisting of SEQ ID NO:205, a fragment thereof at least 16 contiguous nucleotides in length, and sequences that are complementary to, or hybridize under moderately stringent or stringent conditions to SEQ ID NO:205 or to a fragment thereof at least 16 contiguous nucleotides in length; and comparing said at least one methylation state or level of methylation with a suitable standard or control, or comparing said at least one methylation state or level of methylation between or among corresponding methylation variable positions of the samples, whereby at least one of identifying lung cells, organ or tissue, distinguishing lung cells, organ or tissue from one or more other cell, organ or tissue types, or identifying lung cells, organ or tissue as the source of a DNA sample is, at least in part afforded. Preferably, determining comprises at least one of: use of one or more nucleic acid or oligomers comprising, in each case, at least one contiguous base sequence having a length of at least 16 nucleotides that is complementary to, or hybridizes under moderately stringent or stringent conditions to a pretreated genomic DNA sequence selected from a group consisting of SEQ ID NOS:21, 22, 89, 99; SEQ ID NOS:29, 30, 97, 98; SEQ ID NOS:31, 32, 99, 100; SEQ ID NOS:33, 34, 101, 102; SEQ ID NOS:55, 56, 123, 124, and sequences complementary thereto; or use of a methylation-sensitive restriction enzyme on a genomic DNA sequence selected from the group consisting of SEQ ID NO:205 or a fragment thereof at least 16 contiguous nucleotides in length, and sequences that are complementary to, or hybridize under moderately stringent or stringent conditions to SEQ ID NO:205 or a fragment thereof at least 16 contiguous nucleotides in length.

[0068] Yet further embodiments comprise use of a nucleic acid or oligomer, in a method for the identification or distinguishing of liver cells, organ or tissue or a nucleic acid derived there from, or for the identification of liver cells, organ or tissue as the source of said nucleic acid, wherein said nucleic acid or oligomer comprises at least one contiguous base sequence having a length of at least 16 nucleotides that is complementary to, or hybridizes under moderately stringent or stringent conditions to a pretreated genomic DNA sequence selected from the group consisting of SEQ ID NOS:1, 2, 69, 70; SEQ ID NOS:7, 8, 75, 76; SEQ ID NOS:9, 10, 77, 78; SEQ ID NOS:11, 12, 79, 80; SEQ ID NOS:13, 14, 81, 82; SEQ ID NOS:25, 26, 93, 94; SEQ ID NOS:27, 28, 95, 96; SEQ ID NOS:35, 36, 103, 104; SEQ ID NOS:37, 38, 105, 106; SEQ ID NOS:51, 52, 119, 120; SEQ ID NOS:53, 54, 121, 122; SEQ ID NOS:59, 60, 127, 128; and sequences complementary thereto, said method comprising determining the level of methylation of at least one methylation variable positions (MVPs) within one or more sequences of the sequence group.

[0069] Additionally provided is use of a nucleic acid or oligomer, in a method for the identification or distinguishing of liver cells, organ or tissue, or a nucleic acid derived there from, or for the identification of liver cells, organ or tissue as the source of said nucleic acid, wherein said nucleic acid or oligomer comprises at least one contiguous base sequence at least 16 nucleotides in length selected from the group consisting of SEQ ID NOS:137, 138; 143, 144: 145, 146; 147, 148; 149, 150; 161, 162; 163, 164; 171, 172; 173, 174; 187, 188; 189, 190; 19, and SEQ ID NO:196.

[0070] Further embodiment comprise use of a nucleic acid or oligomer, in a method for the identification or distinguishing of brain cells, organ or tissue or a nucleic acid derived there from, or for the identification of brain cells, organ or tissue as the source of said nucleic acid, wherein said nucleic acid or oligomer comprises at least one contiguous base sequence having a length of at least 16 nucleotides that is complementary to, or hybridizes under moderately stringent or stringent conditions to a pretreated genomic DNA sequence selected from the group consisting of SEQ ID NOS:3, 4, 71, 72; SEQ ID NOS:17, 18, 85, 86; SEQ ID NOS:19, 20, 87, 88; SEQ ID NOS:29, 30, 97, 98; SEQ ID NOS:49, 50, 117, 118; SEQ ID NOS:57, 58, 125, 126; SEQ ID NOS:61, 62, 129, 130; SEQ ID NOS:67, 68, 135, 136; and sequences complementary thereto, said method comprising determining the level of methylation of at least one methylation variable positions (MVPs) within one or more sequences of the sequence group.

[0071] Additional embodiments comprise use of a nucleic acid or oligomer, in a method for the identification or distinguishing of brain cells, organ or tissue, or a nucleic acid derived there from, or for the identification of brain cells, organ or tissue as the source of said nucleic acid, wherein said nucleic acid or oligomer comprises at least one contiguous base sequence at least 16 nucleotides in length selected from the group consisting of SEQ ID NOS:139, 140; 153, 154; 155, 156; 157, 158; 165, 166; 185, 186; 193, 194; 197, 198; 203 and SEQ ID NO:204.

[0072] Further embodiment comprise use of a nucleic acid or oligomer, in a method for the identification or distinguishing of breast cells, organ or tissue or a nucleic acid derived there from, or for the identification of breast cells, organ or tissue as the source of said nucleic acid, wherein said nucleic acid or oligomer comprises at least one contiguous base sequence having a length of at least 16 nucleotides that is complementary to, or hybridizes under moderately stringent or stringent conditions to a pretreated genomic DNA sequence selected from the group consisting of SEQ ID NOS:3, 4, 71, 72; SEQ ID NOS:5, 6, 73, 74; SEQ ID NOS:15, 16, 83, 84; SEQ ID NOS:19, 20, 87, 88; SEQ ID NOS:21, 22, 89, 90; SEQ ID NOS:23, 24, 91, 92; SEQ ID NOS:29, 30, 97, 98; SEQ ID NOS:39, 40, 107, 108; SEQ ID NOS:41, 42, 109, 110; SEQ ID NOS:45, 46, 113, 114; SEQ ID NOS:63, 64, 131, 132; SEQ ID NOS:65, 66, 133, 134; SEQ ID NOS:67, 68, 135, 136; and sequences complementary thereto, said method comprising determining the level of methylation of at least one methylation variable positions (MVPs) within one or more sequences of the sequence group.

[0073] Even further embodiments comprise use of a nucleic acid or oligomer, in a method for the identification or distinguishing of breast cells, organ or tissue, or a nucleic acid derived there from, or for the identification of breast cells, organ or tissue as the source of said nucleic acid, wherein said nucleic acid or oligomer comprises at least one contiguous base sequence at least 16 nucleotides in length selected from the group consisting of SEQ ID NOS:139, 140; 141, 142; 151, 152; 155, 156, 157, 158; 159, 160; 165, 166, 175, 176; 177, 178; 181, 182; 199, 200; 201, 202; 203 and SEQ ID NO:204.

[0074] Additional embodiments comprise use of a nucleic acid or oligomer, in a method for the identification or distinguishing of muscle cells, organ or tissue or a nucleic acid derived there from, or for the identification of muscle cells, organ or tissue as the source of said nucleic acid, wherein said nucleic acid or oligomer comprises at least one contiguous base sequence having a length of at least 16 nucleotides that is complementary to, or hybridizes under moderately stringent or stringent conditions to a pretreated genomic DNA sequence selected from the group consisting of SEQ ID NOS:15, 16, 83, 84; SEQ ID NOS:19, 20, 87, 88; SEQ ID NOS:21, 22, 89, 90; SEQ ID NOS:27, 28, 95, 96; SEQ ID NOS:29, 30, 97, 98; SEQ ID NOS:43, 44, 111, 112; SEQ ID NOS:45, 46, 113, 114; SEQ ID NOS:47, 48, 115, 116; SEQ ID NOS:55, 56, 123, 124; SEQ ID NOS:57, 58, 125, 126; SEQ ID NOS:63, 64, 131, 132; and sequences complementary thereto, said method comprising determining the level of methylation of at least one methylation variable positions (MVPs) within one or more sequences of the sequence group.

[0075] Still further embodiments comprise use of a nucleic acid or oligomer, in a method for the identification or distinguishing of muscle cells, organ or tissue, or a nucleic acid derived there from, or for the identification of muscle cells, organ or tissue as the source of said nucleic acid, wherein said nucleic acid or oligomer comprises at least one contiguous base sequence at least 16 nucleotides in length selected from the group consisting of SEQ ID NOS:152, 152; 155, 156; 157, 158; 163, 164; 165, 166; 179, 180; 181, 182; 183, 184; 191, 192; 193, 194; 199 and SEQ ID NO:200.

[0076] Additional embodiments comprise se of a nucleic acid or oligomer, in a method for the identification or distinguishing of lung cells, organ or tissue or a nucleic acid derived there from, or for the identification of lung cells, organ or tissue as the source of said nucleic acid, wherein said nucleic acid or oligomer comprises at least one contiguous base sequence having a length of at least 16 nucleotides that is complementary to, or hybridizes under moderately stringent or stringent conditions to a pretreated genomic DNA sequence selected from the group consisting of SEQ ID NOS:19, 20, 87, 88; SEQ ID NOS:21, 22, 89, 99; SEQ ID NOS:29, 30, 97, 98; SEQ ID NOS:31, 32, 99, 100; SEQ ID NOS:33, 34, 101, 102; SEQ ID NOS:55, 56, 123, 124; and sequences complementary thereto, said method comprising determining the level of methylation of at least one methylation variable positions (MVPs) within one or more sequences of the sequence group.

[0077] Particular embodiments comprise use of a nucleic acid or oligomer, in a method for the identification or distinguishing of lung cells, organ or tissue, or a nucleic acid derived there from, or for the identification of lung cells, organ or tissue as the source of said nucleic acid, wherein said nucleic acid or oligomer comprises at least one contiguous base sequence at least 16 nucleotides in length selected from the group consisting of SEQ ID NOS:155, 156; 157, 158; 165, 166; 167, 168; 169, 170; 191 and SEQ ID NO:192.

[0078] In further aspects the invention comprises se of a nucleic acid or oligomer, in a method for distinguishing as the source of a nucleic acid sample, a first group of tissue or cells from a second group of tissues or cells, wherein said nucleic acid or oligomer comprises at least one contiguous base sequence having a length of at least 16 nucleotides that is complementary to, or hybridizes under moderately stringent or stringent conditions to a pretreated genomic DNA sequence selected from a first group consisting of SEQ ID NOS:19, 20, 87, 88 and sequences complementary thereto, or use in said method of a nucleic acid or oligomer comprising at least one contiguous base sequence having a length of at least 16 nucleotides selected from a second group of SEQ ID NOS:155 and 156, said method comprising determining the methylation state or level of methylation of at least one methylation variable positions (MVPs) within one or more sequences of the first sequence group; wherein the first group of tissues or cells comprises breast, brain and muscle cells or tissues, and the second group of tissues or cells comprises liver; lung and prostate cells or tissues.

[0079] Also provided is use of a nucleic acid or oligomer, in a method for distinguishing as the source of a nucleic acid sample, a first group of tissue or cells from a second group of tissues or cells, wherein said nucleic acid or oligomer comprises at least one contiguous base sequence having a length of at least 16 nucleotides that is complementary to, or hybridizes under moderately stringent or stringent conditions to a pretreated genomic DNA sequence selected from a first group consisting of SEQ ID NOS:21, 22, 89, 90 and sequences complementary thereto, or use in said method of a nucleic acid or oligomer comprising at least one contiguous base sequence having a length of at least 16 nucleotides selected from a second group of SEQ ID NOS:157 and 158, said method comprising determining the methylation state or level of methylation of at least one methylation variable position (MVPs) within one or more sequences of the first sequence group; wherein the first group of tissues or cells comprises breast, liver and muscle cells or tissues, and the second group of tissues or cells comprises lung and brain cells or tissues.

[0080] Yet further embodiments comprise use of a nucleic acid or oligomer, in a method for distinguishing as the source of a nucleic acid sample, a first group of tissue or cells from a second group of tissues or cells, wherein said nucleic acid or oligomer comprises at least one contiguous base sequence having a length of at least 16 nucleotides that is complementary to, or hybridizes under moderately stringent or stringent conditions to a pretreated genomic DNA sequence selected from a first group consisting of SEQ ID NOS:27, 28, 95, 96 and sequences complementary thereto, or use in said method of a nucleic acid or oligomer comprising at least one contiguous base sequence having a length of at least 16 nucleotides selected from a second group of SEQ ID NOS:163 and 164, said method comprising determining the methylation state or level of methylation of at least one methylation variable position (MVPs) within one or more sequences of the first sequence group; wherein the first group of tissues or cells comprises liver and muscle cells or tissues, and the second group of tissues or cells comprises breast and brain cells or tissues.

[0081] In particular aspects, the present invention comprises use of a nucleic acid or oligomer, in a method for distinguishing as the source of a nucleic acid sample, a first group of tissue or cells from a second group of tissues or cells, wherein said nucleic acid or oligomer comprises at least one contiguous base sequence having a length of at least 16 nucleotides that is complementary to, or hybridizes under moderately stringent or stringent conditions to a pretreated genomic DNA sequence selected from a first group consisting of SEQ ID NOS:29, 30, 97, 98 and sequences complementary thereto, or use in said method of a nucleic acid or oligomer comprising at least one contiguous base sequence having a length of at least 16 nucleotides selected from a second group of SEQ ID NOS:165 and 166, said method comprising determining the methylation state or level of methylation of at least one methylation variable position (MVPs) within one or more sequences of the first sequence group; wherein the first group of tissues or cells comprises breast, brain and muscle cells or tissues, and the second group of tissues or cells comprises lung and prostate cells or tissues.

[0082] In further particular aspects, the present invention comprises use of a nucleic acid or oligomer, in a method for distinguishing as the source of a nucleic acid sample, a first group of tissue or cells from a second group of tissues or cells, wherein said nucleic acid or oligomer comprises at least one contiguous base sequence having a length of at least 16 nucleotides that is complementary to, or hybridizes under moderately stringent or stringent conditions to a pretreated genomic DNA sequence selected from a first group consisting of SEQ ID NOS:39, 40, 107, 108 and sequences complementary thereto, or use in said method of a nucleic acid or oligomer comprising at least one contiguous base sequence having a length of at least 16 nucleotides selected from a second group of SEQ ID NOS:175 and 176, said method comprising determining the methylation state or level of methylation of at least one methylation variable position (MVPs) within one or more sequences of the first sequence group; wherein the first group of tissues or cells comprises breast, and prostate cells or tissues, and the second group of tissues or cells comprises brain, lung and liver cells or tissues.

[0083] In yet further particular aspects, the present invention comprises use of a nucleic acid or oligomer, in a method for distinguishing as the source of a nucleic acid sample, a first group of tissue or cells from a second group of tissues or cells, wherein said nucleic acid or oligomer comprises at least one contiguous base sequence having a length of at least 16 nucleotides that is complementary to, or hybridizes under moderately stringent or stringent conditions to a pretreated genomic DNA sequence selected from a first group consisting of SEQ ID NOS:45, 46, 113, 114; 63, 64, 131, 132 and sequences complementary thereto, or use in said method of a nucleic acid or oligomer comprising at least one contiguous base sequence having a length of at least 16 nucleotides selected from a second group of SEQ ID NOS:181, 182, 199 and 200, said method comprising determining the methylation state or level of methylation of at least one methylation variable position (MVPs) within one or more sequences of the first sequence group; wherein the first group of tissues or cells comprises breast and muscle cells or tissues, and the second group of tissues or cells comprises lung, brain, liver and prostate cells or tissues.

[0084] In additional aspects, the present invention comprises use of a nucleic acid or oligomer, in a method for distinguishing as the source of a nucleic acid sample, a first group of tissue or cells from a second group of tissues or cells, wherein said nucleic acid or oligomer comprises at least one contiguous base sequence having a length of at least 16 nucleotides that is complementary to, or hybridizes under moderately stringent or stringent conditions to a pretreated genomic DNA sequence selected from a first group consisting of SEQ ID NOS:67, 68, 135, 136 and sequences complementary thereto, or use in said method of a nucleic acid or oligomer comprising at least one contiguous base sequence having a length of at least 16 nucleotides selected from a second group of SEQ ID NOS:203 and 204, said method comprising determining the methylation state or level of methylation of at least one methylation variable position (MVPs) within one or more sequences of the first sequence group; wherein the first group of tissues or cells comprises breast and brain cells or tissues, and the second group of tissues or cells comprises lung, muscle, liver and prostate cells or tissues.

[0085] In additional aspects, the present invention further comprises use of a nucleic acid or oligomer, in a method for distinguishing as the source of a nucleic acid sample, a first group of tissue or cells from a second group of tissues or cells, wherein said nucleic acid or oligomer comprises at least one contiguous base sequence having a length of at least 16 nucleotides that is complementary to, or hybridizes under moderately stringent or stringent conditions to a pretreated genomic DNA sequence selected from a first group consisting of SEQ ID NOS:57, 58, 125, 126 and sequences complementary thereto, or use in said method of a nucleic acid or oligomer comprising at least one contiguous base sequence having a length of at least 16 nucleotides selected from a second group of SEQ ID NOS:193 and 194, said method comprising determining the methylation state or level of methylation of at least one methylation variable position (MVPs) within one or more sequences of the first sequence group; wherein the first group of tissues or cells comprises brain and muscle cells or tissues, and the second group of tissues or cells comprises lung, breast, liver and prostate cells or tissues.

[0086] Additional embodiments comprise use of a nucleic acid or oligomer, in a method for distinguishing as the source of a nucleic acid sample, a first group of tissue or cells from a second group of tissues or cells, wherein said nucleic acid or oligomer comprises at least one contiguous base sequence having a length of at least 16 nucleotides that is complementary to, or hybridizes under moderately stringent or stringent conditions to a pretreated genomic DNA sequence selected from a first group consisting of SEQ ID NOS:17, 18, 85, 86 and sequences complementary thereto, or use in said method of a nucleic acid or oligomer comprising at least one contiguous base sequence having a length of at least 16 nucleotides selected from a second group of SEQ ID NOS:153 and 154, said method comprising determining the methylation state or level of methylation of at least one methylation variable position (MVPs) within one or more sequences of the first sequence group; wherein the first group of tissues or cells comprises breast and lung cells or tissues, and the second group of tissues or cells comprises brain, muscle, liver and prostate cells or tissues.

[0087] The present invention provides a method for diagnosing a condition or disease characterized by specific methylation levels or methylation states of one or more methylation variable genomic DNA positions in a disease-associated cell or tissue or in a sample derived from a bodily fluid, comprising: obtaining a test cell, tissue sample or bodily fluid sample comprising genomic DNA having one or more methylation variable positions in one or more regions thereof; determining the methylation state or quantified methylation level at the one or more methylation variable positions; and comparing said methylation state or level to that of a genome wide methylation map according to claim 1, said map comprising methylation level values for at least one of corresponding normal, or diseased cells or tissue, whereby a diagnosis of a condition or disease is, at least in part afforded.

[0088] Yet further embodiments provide a method for detecting the absence or presence of a medical condition in an organ, cell type or tissue, comprising: retrieving a bodily fluid sample; determining at least one of the amount or presence, of free-floating DNA that exhibits a tissue-, organ- or cell type-specific DNA methylation pattern by use of a nucleic acid or oligomer comprising at least one contiguous base sequence having a length of at least 16 nucleotides that is complementary to, or hybridizes under moderately stringent or stringent conditions to a pretreated genomic DNA sequence selected from the group consisting of SEQ ID NOS:1 through SEQ ID NO:204 and SEQ ID NOS:206 through SEQ ID NO:221, and sequences complementary thereto; and determining whether there is an abnormal level of free floating DNA that originates from said tissue, cell type or organ, thereby concluding, whether a medical condition associated with said tissue, cell type or organ is absent or present.

[0089] Also provided is a method for diagnosing a condition or disease of an individual characterized by the presence of organ- or tissue-specific free-floating DNA in said individual's bodily fluid, comprising: retrieving a bodily fluid sample; determining at least one of the amount or presence, of free floating DNA that exhibits a tissue-, organ- or cell type-characteristic DNA methylation pattern with the use of at least one nucleic acid or oligomer comprising at least one contiguous base sequence having a length of at least 16 nucleotides that is complementary to, or hybridizes under moderately stringent or stringent conditions to a pretreated genomic DNA sequence selected from the group consisting of SEQ ID NOS:1 through SEQ ID NO:204 and SEQ ID NOS:206 through SEQ ID NO:221, and sequences complementary thereto; and further determining, whether there is an abnormal level of free-floating DNA that originates from said tissue, cell type or organ, and, at least in part thereby, concluding whether a medical condition associated with said tissue, cell type or organ is absent or present.

[0090] In particular embodiments the invention provides a method for diagnosing a condition or disease of an individual characterized by the presence of organ- or tissue-specific free-floating DNA in said individual's bodily fluid, comprising: retrieving a bodily fluid sample; determining the methylation states or methylation levels of MVPs within at least one nucleic acid or oligomer comprising at least one contiguous base sequence having a length of at least 16 nucleotides that is complementary to, or hybridizes under moderately stringent or stringent conditions to a pretreated genomic DNA sequence selected from the group consisting of SEQ ID NOS:1 through SEQ ID NO:204 and SEQ ID NOS:206 through SEQ ID NO:221 and sequences complementary thereto; comparing said methylation states or levels to that of a genome-wide methylation map according to claim 1, said map comprising methylation level values of the corresponding nucleic acids for a plurality of normal organs, cells or tissues; and determining whether the methylation states or levels of b) match with known values and whether a specific organ or tissue is dominant, whereby a diagnosis of a condition or disease is, at least in part, afforded. Preferably, said free-floating DNA is derived from a tissue or organ selected from the group consisting of lung, liver, muscle, breast, brain or prostate.

[0091] Additional embodiments provide a method for at least one of choosing or monitoring a course of treatment, comprising, obtaining a diagnosis according to claims 49 to 52, whereby at least one of choosing or monitoring a course of treatment is, at least in part, afforded.

[0092] Also provided is use of a method according to any one of claims 49-53 for diagnosing a disease of an individual, diagnosing a condition of an individual, prognosing a disease of an individual, monitoring disease progression, monitoring treatment response, monitoring the occurrence of treatment side affects, or for classification, differentiation, grading, staging, or diagnosing of a cell proliferative disease or for a combination thereof.

[0093] Further embodiments provide a method for at least one of, identifying one organ, cell or tissue type, or distinguishing one organ, cell or tissue type from another as the source of a nucleic acid sample, comprising: obtaining a nucleic acid sample having genomic DNA; pretreating the genomic DNA, or a fragment thereof, with one or more agents to convert 5-position unmethylated cytosine bases to uracil or to another base that is detectably dissimilar to cytosine in terms of hybridization properties; contacting the pretreated genomic DNA, or the pretreated fragment thereof, with an amplification enzyme and at least one primer set, each said set comprising first and second primer each having a contiguous sequence at least 16 nucleotides in length that is complementary to, or hybridizes under moderately stringent or stringent conditions to a sequence selected from, in the case of the first primer, a first group consisting of SEQ ID NOS:1-136, and selected from, in the case of the second primer, a second group consisting of sequences complementary to the sequences of the first group, wherein the pretreated DNA, or the fragment thereof is either amplified to produce one or more amplificates, or is not amplified; and determining, based on the presence or absence of, or on a property of said amplificate, the methylation state or level of methylation of at least one MVP within the pretreated version of SEQ ID NO:205 or within a contiguous region thereof, or an average, or a value reflecting an average methylation state of a plurality of MVPs within the pretreated version of SEQ ID NO:205 or within a contiguous region thereof, whereby at least one of identifying one organ, cell or tissue type, or distinguishing one organ, cell or tissue type from another as the source of the nucleic acid sample is, at least in part afforded. Preferably, treating the genomic DNA, or the fragment thereof, comprises use of a solution selected from the group consisting of bisulfite, hydrogen sulfite, disulfite, and combinations thereof. Preferably, at least one of contacting, or determining comprises use of a method selected from the group consisting of MSP, MethyLight™, HeavyMethyl™, MS-SNuPE™, and combination thereof. Preferably, at least one of said primers comprises a sequence selected from the group consisting of SEQ ID NO:137 through SEQ ID NO:204. Preferably, the contiguous sequence of one or more of said primers comprises at least one 5′-CG-3′, 5′-tG-3′ or 5′-Ca-3′ dinucleotide. Preferably the methods comprise use of at least one oligomer comprising a contiguous sequence at least 16 nucleotides in length having one or more 5′-CG-3′, 5′-tG-3′ or 5′-Ca-3′ dinucleotides that were CG dinucleotides prior to pretreating in b) of claim 54, and wherein the contiguous sequence of said oligomer is complementary or identical to a sequence selected from the group consisting of SEQ ID NOS:1-136, and complements thereof, and wherein said oligomer suppresses amplification of the nucleic acid to which it is hybridized. Preferably, determining the methylation state, or level of methylation or the average methylation state or average level of methylation comprises use of at least one reporter or probe oligomer that hybridizes to one or more 5′-CG-3′, 5′-TG-3′ or 5′-CA-3′ dinucleotides, at positions which were 5′-CG-3′ dinucleotides prior to pretreating, whereby amplification of one or more target sequences is, at least in part, afforded.

[0094] Particular embodiments comprise use of the inventive methods for the analysis, characterization, classification, differentiation, grading, staging, diagnosis, or prognosis of cell proliferative disorders, or the predisposition to cell proliferative disorders, or combination thereof.

[0095] Particular embodiments comprise use of the inventive methods for the analysis, characterisation, classification, differentiation, grading, staging, or diagnosis or a combination thereof of prostate cancer, breast cancer, lung cancer, liver cancer or brain cancer, or the predisposition to said types of cancer.

[0096] Additional embodiments provide for a kit useful for identifying one tissue, organ or cell type as the source of a nucleic acid, or for distinguishing one tissue, organ or cell type from another among a group of tissue organ or cell types, as the source of a nucleic acid comprising: a bisulfite reagent or a methylation-sensitive deamination enzyme; and at least one oligomer comprising, in each case a contiguous sequence of at least 9 nucleotides in length that is complementary to, or hybridizes under moderately stringent or stringent conditions to a sequence selected from the group consisting of SEQ ID NOS:1-136, and complements thereof. Preferably, the tissue type group comprises at least two tissue types selected from the group consisting of prostate, breast, lung, liver, muscle and brain. Also provided is a kit useful for detecting, diagnosing, prognosing or differentiating cell proliferative disorders of the prostate, breast, lung, liver, muscle or brain, or for distinguishing between cell proliferative disorders of the prostate, breast, lung, liver, muscle or brain, comprising: a bisulfite reagent or a methylation sensitive deamination enzyme; and at least one nucleic acid molecule or peptide nucleic acid molecule comprising, in each case a contiguous sequence at least 9 nucleotides in length that is complementary to, or hybridizes under moderately stringent or stringent conditions to a sequence selected from the group consisting of SEQ ID NOS:1-136, and complements thereof.

[0097] Preferably, the kit comprises standard reagents for performing a methylation assay selected from the group consisting of MS-SNuPE™, MSP, MethylLight™, HeavyMethyl™, COBRA™, nucleic acid sequencing, and combinations thereof.

[0098] Yet further embodiments provide a method of providing diagnostic information relating to cancer, comprising: determining the relative amount of free-floating DNA derived from a specific organ or tissue within the total amount of free-floating DNA in a bodily fluid sample of a patient suspected of suffering from a cell proliferative disorder, wherein said determining comprises determination of the level of methylation of at least three MVPs or CpGs selected from the group identified in Tables 37-70 in said bodily fluid sample, and wherein a methylation pattern is provided; comparing said methylation pattern with methylation patterns found in a plurality of samples that have been identified to be characteristic for specific organs or tissues out of a group of other organs or tissues; determining, in relation to samples from healthy donors, whether the methylation pattern determined in a) indicates an increased relative amount of free-floating DNA derived from a specific organ or tissue within the total amount of free-floating DNA in said bodily fluid, whereby a conclusion as to whether said patient has an increased risk of developing cancer is, at least in part, afforded. Preferably, the methylation pattern comprises the levels of methylation of at least 5 CpG positions. Preferably, at least three MVPs or CpG positions of which the level of methylation is determined, are located within a 500 bp genomic region.

### BRIEF DESCRIPTION OF THE DRAWINGS

[0099] FIGS. 1-34 represent the levels of methylation at particular CpG positions that are unambiguously identifiable by the numbers at the left of the gray-scaled pattern. The numbers indicate the position, in nucleotides from the 5′-end of amplificate, of each CpG (more specifically, the position of the base, which was a cytosine, prior to pretreatment with a bisulfite reagent) within the amplified section when using the primers as presented in TABLE 1. The terms at the top of the Figure (brain, breast, liver, lung, muscle and prostate) indicate the tissue types from which the analyzed samples were derived. The methylation ‘pattern’ (see definitions below) is represented in the field within the gray shaded boxes. The shade of gray directly correlates with the level of methylation, as is disclosed in detail in FIG. 35. A black box represenets a methylation percentage of 100%, indicating that every single DNA molecule within the sample analyzed was methylated at the corresponding position. A very light gray box, however, indicates that all DNA molecules were unmethylated at the corresponding position. A white box indicates that no value was obtained.

[0100] FIG. 35 shows the correlation between the different shades of gray and the corresponding levels of methylation, expressed as percentages.

[0101] FIG. 36 displays the sequence traces of two bisulfite sequencing runs corresponding to an exemplary methylation variable position (MVP) identified in a ‘major histocompatibility complex’ (MHC) embodiment according to the present invention. Bisulfite-treated DNA of two different healthy tissues was analyzed by sequencing using the same primer. The left sequence shows the analysis of bisulfite-treated DNA, isolated from healthy lung tissue (indicated by the letter “L”), wherein the cytosine of interest was methylated in the untreated DNA. The right trace shows the analysis of bisulfite-treated DNA, isolated from healthy brain tissue (indicated by the letter “B”), wherein the corresponding cytosine position was unmethylated in the untreated DNA. Bisulfite sequencing is based on the conversion of all non-methylated cytosines to uracil, by treatment of genomic DNA with bisulfite. In the sequence trace, non-methylated cytosine appears therefore as T (effectively replaces U during amplification of the DNA with dNTPs prior to sequencing), while methylated C appears as C (effectively replaces 5-mCyt during amplification of the DNA with dNTPs prior to sequencing). The question as to whether a thymine signal herein represents a base that was a thymine prior to bisulfite treatment, or a converted cytosine requires a comparison of the sequence of pretreated DNA with that of the corresponding untreated genomic DNA. The different dotted lines represent the differentially colored lines in the original trace output file, as indicated in the figure.

### DETAILED DESCRIPTION OF THE INVENTION

Definitions:

[0102] For purposes of the present invention, “classes of DNA sources” refers to any distinct sets of samples containing DNA. Preferably said classes are of biological matter, and in such cases, they are referred to herein as ‘classes of biological samples’.

[0103] The term “tissue” in this context is meant to describe a group or layer of cells that are alike and that work together to perform a specific function.

[0104] The phrase “phenotypically distinct” shall be used to describe organisms, tissues, cells or components thereof, which can be distinguished by one or more characteristics, observable and/or detectable by current technologies. Each of such characteristics may also be defined as a parameter contributing to the definition of the phenotype. Wherein a phenotype is defined by one or more parameters an organism that does not conform to one or more of said parameters shall be defined to be distinct or distinguishable from organisms of said phenotype. Excluded from those characteristics are differences in the organisms' (or the components') cytosine methylation patterns and differences in their DNA sequences.

[0105] The term “abnormal” when used in the context of organisms, tissues, cells or components thereof, shall refer to those organisms, tissues, cells or components thereof that differ in at least one observable or detectable characteristic (e.g., age, treatment, time of day, etc.) from those organisms, tissues, cells or components thereof that display the “normal” (expected) respective characteristic. Characteristics which are normal or expected for one cell or tissue type, might be abnormal for a different cell or tissue type.

[0106] The term “oligomer” encompasses oligonucleotides, PNA-oligomers and LNA-oligomers, and is used whenever a term is needed to describe the alternative use of an oligonucleotide or a PNA-oligomer or LNA-oligomer, which cannot be described as oligonucleotide. Said oligomer can be modified as it is commonly known and described in the art. The term “oligomer” also encompasses oligomers carrying at least one detectable label, and preferably fluorescence labels are understood to be encompassed. It is however also understood that the label can be of any kind that is known and described in the art.

[0107] The term “Observed/Expected Ratio” (“O/E Ratio”) refers to the frequency of CpG dinucleotides within a particular DNA sequence, and corresponds to the [number of CpG sites/(number of C bases x number of G bases)]×band length for each fragment.

[0108] The term “CpG island” refers to a contiguous region of genomic DNA that satisfies the criteria of (1) having a frequency of CpG dinucleotides corresponding to an “Observed/Expected Ratio”>0.6, and (2) having a “GC Content”>0.5. CpG islands are typically, but not always, between about 0.2 to about 1 kb in length, and may be as large as about 3 kb in length.

[0109] The term “methylation state” or “methylation status” refers to the presence or absence of 5-methylcytosine (“5-mCyt”) at one or a plurality of CpG dinucleotides within a DNA sequence. Methylation states at one or more CpG methylation sites within a single allele's DNA sequence include “unmethylated,” “fully-methylated” and “hemi-methylated.”

[0110] The term “hemi-methylation” or “hemimethylation” refers to the methylation state of a CpG methylation site, where only one strand's cytosine of the CpG dinucleotide sequence is methylated (e.g., 5′-TTCMGTA-3′ (top strand): 3′-AAGCAT-5′ (bottom strand)).

[0111] The term “hypermethylation” refers to the average methylation state corresponding to an increased presence of 5-mCyt at one or a plurality of CpG dinucleotides within a DNA sequence of a test DNA sample, relative to the amount of 5-mCyt found at corresponding CpG dinucleotides within a normal control DNA sample.

[0112] The term “hypomethylation” refers to the average methylation state corresponding to a decreased presence of 5-mCyt at one or a plurality of CpG dinucleotides within a DNA sequence of a test DNA sample, relative to the amount of 5-mCyt found at corresponding CpG dinucleotides within a normal control DNA sample.

[0113] “Methylation level” or “methylation degree” refers to the average amount of methylation present at an individual CpG dinucleotide. Methylation levels may be expressed as a percentage. Measurement of methylation levels at a plurality of different CpG dinucleotide positions creates either a methylation profile or a methylation pattern.

[0114] The term “methylation profile” refers to a profile that is created when average methylation levels of multiple CpGs (scattered throughout the genome) are collected. Each single CpG position is analyzed independently of the other CpGs in the genome, but is analyzed collectively across all homologous DNA molecules in a pool of differentially methylated DNA molecules.

[0115] The term “methylation pattern” refers to the description of methylation states of a number of CpG positions in proximity to each other. For example a full methylation of 5-10 closely linked CpG positions, may comprise a methylation pattern that is quite rare and might well be specific for a specific DNA molecule. The term “methylation pattern” can also refer to the description of methylation levels of such a number of proximate CpG positions when measured on a plurality of DNA molecules in a pool of differentially methylated DNA molecules. In that case a methylation level of 100% of 5-10 closely linked CpG positions may be a methylation pattern that is quite rare and will be specific for a specific DNA source, such as a type of tissue or cell.

[0116] The term “microarray” refers broadly to both “DNA microarrays” and “DNA chip(s),” and encompasses all art-recognized solid supports, and all art-recognized methods for affixing nucleic acid molecules thereto or for synthesis of nucleic acids thereon.

[0117] “Genetic parameters” as used herein are mutations and polymorphisms of genes and sequences further required for gene regulation. Exemplary mutations are, in particular, insertions, deletions, point mutations, inversions and polymorphisms and, particularly preferred, SNPs (single nucleotide polymorphisms).

[0118] “Epigenetic parameters” are, in particular, cytosine methylations. Further epigenetic parameters include, for example, the acetylation of histones which, however, cannot be directly analyzed using the described method but which, in turn, correlate with the DNA methylation.

[0119] The term “bisulfite reagent” refers to a reagent comprising bisulfite, disulfite, hydrogen sulfite or combinations thereof, useful as disclosed herein to distinguish between methylated and unmethylated CpG dinucleotide sequences.

[0120] The term “Methylation assay” refers to any assay for determining the methylation state or methylation level of one or more CpG dinucleotide sequences within a sequence of DNA.

[0121] The term “MS AP-PCR” (Methylation-Sensitive Arbitrarily-Primed Polymerase Chain Reaction) refers to the art-recognized technology that allows for a global scan of the genome using CG-rich primers to focus on the regions most likely to contain CpG dinucleotides, and described by Gonzalgo et al., Cancer Research 57:594-599, 1997.

[0122] The term “MethyLight™” refers to the art-recognized fluorescence-based real-time PCR technique described by Eads et al., Cancer Res. 59:2302-2306, 1999.

[0123] The term “HeavyMethyl™” assay, in the embodiment thereof implemented herein, refers to a HeavyMethyl™ MethyLight™ assay, which is a variation of the MethyLight™ assay, wherein the MethyLight™ assay is combined with methylation specific blocking probes covering CpG positions between the amplification primers.

[0124] The term “Ms-SNuPE” (Methylation-sensitive Single Nucleotide Primer Extension) refers to the art-recognized assay described by Gonzalgo & Jones, Nucleic Acids Res. 25:2529-2531, 1997.

[0125] The term “MSP” (Methylation-specific PCR) refers to the art-recognized methylation assay described by Herman et al. Proc. Natl. Acad. Sci. USA 93:9821-9826, 1996, and by U.S. Pat. No. 5,786,146.

[0126] The term “COBRA” (Combined Bisulfite Restriction Analysis) refers to the art-recognized methylation assay described by Xiong & Laird, Nucleic Acids Res. 25:2532-2534, 1997.

[0127] The term “MCA” (Methylated CpG Island Amplification) refers to the methylation assay described by Toyota et al., Cancer Res. 59:2307-12, 1999, and in WO 00/26401A1.

[0128] The term “hybridization” is to be understood as the binder of a bond of an oligonucleotide to a complementary sequence along the lines of the Watson-Crick base pairings, including the pairing of a uracil with an adenine, in the sample DNA, forming a duplex structure.

[0129] “Stringent hybridization conditions”, as defined herein, involve hybridizing at 68° C. in 5×SSC/5× Denhardt's solution/1.0% SDS, and washing in 0.2×SSC/0.1% SDS at room temperature, or involve the art-recognized equivalent thereof (e.g., conditions in which a hybridization is carried out at 60° C. in 2.5×SSC buffer, followed by several washing steps at 37° C. in a low buffer concentration, and remains stable). Moderately stringent conditions, as defined herein, involve including washing in 3×SSC at 42° C., or the art-recognized equivalent thereof. The parameters of salt concentration and temperature can be varied to achieve the optimal level of identity between the probe and the target nucleic acid. Guidance regarding such conditions is available in the art, for example, by Sambrook et al., 1989, Molecular Cloning, A Laboratory Manual, Cold Spring Harbor Press, N.Y.; and Ausubel et al. (eds.), 1995, Current Protocols in Molecular Biology, (John Wiley & Sons, N.Y.) at Unit 2.10.

[0130] The term “MVP” refers to a methylation variable position (MVP), which is a CpG position that is differentially methylated in different phenotypically distinct types of samples, such as, but not limited to different tissues, hence a CpG position that shows variable methylation between different tissues.

[0131] The phrase “sequence context” in the context of selected CpG dinucleotide sequences refers to a genomic region of from 2 nucleotide bases to about 3 Kb surrounding or including a differentially methylated CpG dinucleotide (MVP) identified by the genome-wide discovery method described herein. Said context region comprises, according to the present invention, at least one secondary differentially methylated CpG dinucleotide sequence, or comprises a pattern having a plurality of differentially methylated CpG dinucleotide sequences including the primary and at least one secondary differentially methylated CpG dinucleotide sequences. Preferably, the primary and secondary differentially methylated CpG dinucleotide sequences within such context region are comethylated in that they share the same methylation status in the genomic DNA of a given tissue sample. Preferably the primary and secondary CpG dinucleotide sequences are comethylated as part of a larger comethylated pattern of differentially methylated CpG dinucleotide sequences in the genomic DNA context. The size of such context regions varies, but will generally reflect the size of CpG islands as defined above, or the size of a gene promoter region, including the first one or two exons.

[0132] The term “MVP database” refers to a database containing the methylation levels and locations of differentially methylated CpG positions, in relation to the detailed description of samples including, for example, all, or a portion of all available phenotypical characteristics, and clinical parameters. The database is searchable, for example, for CpG positions that are differentially methylated between or among two or more phenotypically distinct types of tissues/samples.

[0133] With respect to the dinucleotde designations within the phrase “CpG, tpG and Cpa,” a small “t” is used to indicate a thymine at a cytosine position, whenever the cytosine was transformed to uracil by pretreatment, whereas, a capital “T” is used to indicate a thymine position that was a thymine prior to pretreatment). Likewise, a small “a” is used to indicate the adenine corresponding to such a small “t” located at a cytosine position, whereas a capital “A” is used to indicate an adenine that was adenine prior to pretreatment.

[0134] The term “tumor marker” refers to a distinguishing or characteristic substance that may be found in blood or other bodily fluids, or in tissues that is reflective of a particular tumor. The substance may, for example, be a protein, an enzyme, a RNA molecule or a DNA molecule. The term may alternately refer to a specific characteristic of said substance, such as but not limited to a specific methylation pattern, making the substance distinguishable from otherwise identical substances. A high level of a tumor marker may indicate that a certain type of cancer is developing in the body. Typically, this substance is derived from the tumor itself. Examples of tumor markers include, but are not limited to CA 125 (ovarian cancer), CA 15-3 (breast cancer), CEA (ovarian, lung, breast, pancreas, and gastrointestinal tract cancers), and PSA (prostate cancer).

[0135] The term “tissue marker” refers to a distinguishing or characteristic substance that may be found in blood or other bodily fluids, but mainly in cells of specific tissues. The substance may for example be a protein, an enzyme, a RNA molecule or a DNA molecule. The term may alternately refer to a specific characteristic of said substance, such as but not limited to a specific methylation pattern, making the substance distinguishable from otherwise identical substances. A high level of a tissue marker found in a cell may mean said cell is a cell of that respective tissue. A high level of a tissue marker found in a bodily fluid may mean that a respective type of tissue is either spreading cells that contain said marker into the bodily fluid, or is spreading the marker itself into the blood or other bodily fluids.

[0136] The term “ESME” refers to a novel and particularly preferred software program that considers or accounts for the unequal distribution of bases in bisulfite converted DNA and normalizes the sequence traces (electropherograms) to allow for quantitation of methylation signals within the sequence traces. Additionally, it calculates a bisulfite conversion rate, by comparing signal intensities of thymines at specific positions, based on the information about the corresponding untreated DNA sequence.

[0137] Unless defined otherwise, all technical and scientific terms used herein have the same meaning as commonly understood by one of ordinary skill in the art to which the invention pertains. Although any methods and materials similar or equivalent to those described herein can be used for testing of the present invention, the preferred materials and methods are described herein. All documents cited herein are thereby incorporated by reference.

Overview

[0138] The invention comprises, inter alia, a method for identifying, cataloguing and interpreting genome-wide DNA methylation patterns of all human genes in all major tissues. More precisely, the method is concerned with the identification of cytosines in the context of 5′-CG-3′ dinucleotides (i.e., CpG positions), that are differentially methylated in different sample types, for example, in different tissues, organs or cell types. Such differentially methylated cytosine bases are referred to herein as ‘Methylation Variable Positions’ (MVPs). Sample type-specific methylation patterns can be identified by comparing the levels of methylation at one, or preferably several MVPs within a selected genomic region, of DNA obtained from several different sample types. A distinct region of the genome, such as a region of interest (ROI), which comprises one or preferably several of these MVPs can be utilized as a marker (e.g., as a tissue type marker). It is particularly preferred that these MVPs are positioned close to each other. An isolated MVP may suffice as a marker, but it is highly preferred that several CpG positions closely linked to each other are analyzed simultaneously in a suitable methylation analysis assay, such as MethyLight™, HeavyMethyl™ or MSP™.

[0139] Particular embodiments of the present invention provide one or more markers selected by performing the inventive method as disclosed in EXAMPLE 1 herein below.

[0140] Additional embodiments provide exemplary novel uses of these tissue markers, as illustrated in EXAMPLES 2-6 herein below.

[0141] The robust discovery method described herein enables and otherwise provides for the discovery of MVPs and hence the discovery of distinguishing marker regions of genomic DNA.

[0142] Additional embodiments provide for comparative data evaluation across different experiments, and between and among different sample types and different genomic regions. The present methods differ from other well known and described methylation discovery methods, in that the present methods provide, inter alia, quantitative information (i.e. levels of methylation at specific sites; and not only a ‘yes or no’ information) on the methylation status of a CpG. As the inventive methods are based on DNA sequencing, they bear three additional advantages. Firstly, the identified MVPs can be instantly mapped to the genome, without a requirement for further experiments; that is, there is no subsequent cloning, and therefore no danger of losing or mixing up results in the process of cloning or sequencing of the amplificates.

[0143] Secondly, the inventive methods for identifying suitable markers, which are based on bisulfite amplification product sequencing, are suitable for high throughput processing, as has been demonstrated on an expansive practical scale by the large sequencing facilities involved in elucidating the sequence information of the human genome. The high throughput aspect is necessary, because obtaining accurate and useful results requires analyzing a sufficiently high number of samples derived from different representative well defined nucleic acid sources, such as defined human tissues, organs or cell lines.

[0144] A third advantage over prior art discovery methods is that the present methods allow simultaneous comparative analysis of methylation levels of a number of CpG positions that are located next to each other (i.e., analysis of ‘proximate’ CpG positions). Proximate CpG positions are typically co-methylated, but, significantly, are not necessarily so. The present sequencing discovery methods allow for identification of regions (comprising a plurality of CpG or MVP positions) as markers, instead of identification of only single CpG or MVP positions.

[0145] Significantly, in the prior art, only single CpGs have been identified to be differentially methylated, and alleged ‘markers’ comprising multiple CpGs have only been tentatively identified by relying on the assumption that proximate CpG positions are co-methylated.

[0146] The inventive method described herein, however, removes the necessity to rely on said assumption, and therefore provides markers having confirmed utilility as useful tools to distinguish sample types. Significantly, according to the present invention, the differentiating utility of the prior art single CpG analysis is substantially limited in comparison to that comprising quantitative analysis of several proximate CpG positions.

[0147] Additionally, and preferably, analysis of CpG positions within marker regions comprises quantitative analysis of corresponding individual positions in multiple samples of each sample type, improving the quality and hence utility of an identified marker region or of one or more proximate individual MVPs.

[0148] Particular embodiments provide a method for analysis of as many as several thousand loci, comprising, for example, all, or a portion of all genes of several chromosomes, or of all the human chromosomes for a number of different nucleic acid sources, and in a manner that allows an informative comparison between all of these levels of methylation.

[0149] According to the present invention, bisulfite sequencing provides sufficient robustness for high throughput applications, and quantification and standardization of the data is provided by one or more algorithms or a software program that allows for determination of quantitative methylation levels (as defined herein above). In particularly preferred embodiments describe herein, the algorithm or software program is ESME.

[0150] According to the present invention, correlations between specific methylation patterns and phenotypes such as age, gender or disease can be determined, as well as correlations between specific methylation patterns and different cell, tissue or organ types. The afforded knowledge of genome-wide methylation patterns also provides a novel resource for the understanding of fundamental biological processes such as gene regulation, imprinting of genes, development, genome stability, disease susceptibility and the interplay of genetics and environment. Moreover, such knowledge can be used to assess if and how methylation patterns respond to environmental influences, such as nutrition, or smoking, etc.

[0151] Moreover, the present invention enables correlations of DNA-methylation patterns with parameters such as tumorigenesis, progression and metastasis, stem cells and differentiation, proliferation and cell cycle, diseases and disorders, and metabolism to be generated.

[0152] In a preferred embodiment, the inventive methods are used to identify methylation positions and markers all over the genome, the level of methylation of which varies between different cell types. For this embodiment, sufficiently large sets of samples are analyzed, and a map of methylation variable positions (MVPs) containing information on said levels of methylation is produced. According to the present invention, non-variable CpG positions, the methylation of which is conserved between all the representative sample types tested, are unlikely to carry disease or tissue specific information.

[0153] The methylation data afforded and produced according to the present invention not only serves as a resource to the research community, but is also directly utilized to identify useful tools, such as tissue specific markers (e.g., the inventive MHC markers disclosed herein below in EXAMPLE 1).

[0154] According to the present invention, particular variable CpG positions (MVPs) identified in healthy tissues are altered in diseased tissue. This is tested and established by inventive methylation analysis of the MVPs in comparison to other positions for diseased tissues. Accordingly, a specific subset of MVPs that are of major importance in cell differentiation, and the alteration of which is correlated with disease is thereby establishable.

[0155] Methylation patterns of specific cell types that reflect the pattern of active genes within these cells, and therefore describe the tasks a certain cell performs at a given time are establishable with the novel methods described herein. Knowledge of these patterns enables new ways to discover diagnostic and therapeutic targets, to monitor cell differentiation (e.g., in tissue engineering) and to differentiate or distinguish generally between or among different cell types, healthy and diseased, by providing a set of differentially methylated genes. The latter provides the tools, for example, for enhanced development of diagnostic products, target identification, patient stratification in clinical trials and future personalized medicines and treatments.

[0156] Unlike prior art efforts in the methylation field, the present methods are not based on, or limited to a ‘candidate’ gene approach, but provide for the discovery and use of differential methylation patterns on a genome-wide basis. The methylation blueprint (map) produced not only contributes to an understanding of factors affecting the methylation of non-coding genomic regions, but also serves as a resource for virtually all methylation research on human samples by providing the quantitative methylation level of the 5′-CG-3′ positions that are actually variable in the genome.

Collecting Samples and Sample Information

[0157] Preferably, for the inventive methods, sufficient starting material (e.g., sufficient number of samples, or nucleic acids derived from a sufficient number of samples) is acquired. Preferably, all relevant and available information (indica) on the sample types used is collected and documented, to allow for pooling of samples whenever necessary. Sufficient background information allows for a sensible decision as to which samples or sample types can be pooled in order to gain as much information as possible from as little material as is available.

[0158] Preferably, as one step of the method, a sample matrix is designed, that relates or correlates specific properties of the pooled or un-pooled sample types with a number of different analytical ‘questions’ that can be addressed with the methylation analysis described herein below.

Loci Selection

[0159] As a first step of the inventive genome-wide methylation analysis method, the loci that are investigated during the subsequent steps are selected. A locus of interest (LOI) comprises a genomic region that contains a number of CpG positions. Preferably, loci are chosen that reside in non-coding genomic regions predicted to be implicated in the regulation of neighboring genes. Preferably, the loci are selected randomly, with the only selection criterion being that a representative coverage of the genome, or of a portion thereof is achieved.

Resulting Matrix and Sample Type Selection

[0160] A subsequenct step comprises listing all different sample types that have been selected for analysis, as sample type units. Preferably, said listing is of every phenotypically distinct and identifiable cell type as independent single units in one dimension, and listing all CpG positions within the selected loci, preferably all CpG positions within the entire genome in another dimension, resulting in a large two-dimensional matrix.

[0161] According to the present invention, a functional epigenomic map is generated by filling of the matrix with the relevant quantitative methylation level information. Generation of such a map is not trivial, because the high number of methylation analyses necessary can not be performed in one experiment. Rather, a large number of experiments must be standardized in a manner allowing for an informative comparison of methylation data across different experiments; that is, a broad analysis must be performed. A major requirement of a suitable broad analysis, like the inventive one described and enabled herein, is to provide a system that generates robust data, and that comprises a data evaluation tool that normalizes said broad analysis data to enable comparison of the results across different experiments.

[0162] For utility in gaining a defined value in the two-dimensional matrix of the inventive epigenome map, the methylation data needs to be comparable in two dimensions or aspects. First, methylation levels of different CpGs within the same tissue need to be comparable to each other.

[0163] Second, methylation levels of identical CpG positions, but measured in different sample types need to be comparable to each other. An informative and useful comparison is enabled only when these requirements are fulfilled and a relativization (normalization) of the data set can be achieved. According to the present invention, these requirements are met by using the bisulfite sequencing approach in combination with the novel data evaluation tool, such as with ESME in preferred embodiments. ESME is described herein below, and in detail in the patent application EP 02 090 203 (filed at the 5^{th} of June 2002), which is incorporated herein by reference.

DNA Isolation

[0164] The different biological samples utilized in the present invention comprise nucleic acids, preferably genomic DNA. Typically, the samples comprise a mixture of methylated and unmethylated cytosine bases per CpG position. Preferably, genomic DNA used for MVP screening is isolated prior to subsequenct pre-treatment (described below), and most preferably also purified prior to said pre-treatment. Alternatively, the nucleic acids of interest are pre-treated within the environment of the biological sample. The pretreatment itself, or an equivalent thereof, is a required step in the inventive “quantitative sequencing method” (although not for the the presently disclosed methods of use of such established markers and MVP).

[0165] DNA isolation may be performed by any art-recognized method. Such protocols are well known in the art and, for example, can be found in Sambrook, Fritsch and Maniatis, Molecular Cloning: A Laboratory Manual, CSH Press, 2nd edition, 1989: Isolation of genomic DNA from mammalian cells, Protocol I, p. 9.16-9.19. A useful tool for the isolation of nucleic acids from biological samples is the QIAamp DNA mini kit (Qiagen, Hilden, Germany), which provides the necessary agents and a protocol. DNA from plasma and serum samples is preferably extracted using a QIAamp Blood Kit (Qiagen, Hilden, Germany) and the ‘blood and body fluid’ protocol as recommended by the manufacturer. DNA Purification may be done, for example, on Qiagen columns supplied in the Qiamp Blood Kit.

Bisulfite Treatment

[0166] Preferably the genomic sequences of said regions of interest (ROI; that is, the sequences at the selected loci) are known and publicly available. In EXAMPLE 1 described herein below, the genomic sequence on which the inventive analysis is applied is the Major Histocompatibility Complex MHC (SEQ ID NO:205). It is impossible to distinguish between methylated and unmethylated cytosine bases within said sequences, given only the genomic sequencing data. Such differentiation, however, becomes possible by pretreatment of the nucleic acids with an agent, or series of agents, which differentiates between methylated and unmethylated cytosine bases. According to the present invention, such an agent could be, an enzyme that interacts specifically with the one form but not with the other, for example, a methylation-sensitive restriction enzyme or a methylation-sensitive deglycosylase or deaminase (e.g., the cytidine deaminase described in Bransteitter et al., Proc Natl Acad Sci USA. 100: 4102-7, 2003), or a chemical agent. In a preferred embodiment, the nucleic acids are pretreated in such a manner that cytosine bases which are unmethylated at the 5′-position are converted to uracil, thymine, or another base which is detectably dissimilar to cytosine in terms of hybridization behavior. It is preferred that the pretreatment of nucleic acids is carried out with a bisulfite reagent (sulfite, disulfite) and that a subsequent alkaline hydrolysis takes place, which results in a conversion of non-methylated cytosine nucleobases to uracil or to another base which is detectably dissimilar to cytosine in terms of base pairing behavior.

[0167] The bisulfite-mediated conversion of the genomic sequences into ‘bisulfite sequences’ may take place in any standard, art-recognized format. This includes, but is not limited to modification within agarose gel or in denaturing solvents. The nucleic acid may be, but is not required to be, concentrated and/or otherwise conditioned before the said nucleic acid sample is pretreated with said agent. The pretreatment with bisulfite can be performed within the sample or after the nucleic acids are isolated. Preferably, pretreatment with bisulfite is performed after DNA isolation, or after isolation and purification of the nucleic acids.

[0168] The double-stranded DNA is preferentially denatured prior to pretreatment with bisulfite. The bisulfite conversion thus consists of two important steps, the sulfonation of the cytosine, and the subsequent deamination thereof. The equilibra of the reaction are on the correct side at two different temperatures for each stage of the reaction. The temperatures and length at which each stage is carried out may be varied according to the specific requirements of the situation.

[0169] Preferably, sodium bisulfite is used as described in WO 02/072880. Particularly preferred, is the so called agarose-bead method, wherein the DNA is enclosed in a matrix of agarose, thereby preventing the diffusion and renaturation of the DNA (bisulfite only reacts with single-stranded DNA), and replacing all precipitation and purification steps with fast dialysis (Olek et al., Nucleic Acids Res. 24: 5064-5066, 1996). It is further preferred that the bisulfite pretreatment is carried out in the presence of a radical scavenger or DNA denaturing agent, such as oligoethylenglycoldialkylether or preferably Dioxan. The DNA may then be amplified without need for further purification steps.

[0170] Said chemical conversion, however, may also take place in any format standard in the art. This includes, but is not limited to modification within agarose gel, in denaturing solvents or within capillaries.

[0171] Generally, the bisulfite pretreatment transforms unmethylated cytosine bases, whereas methylated cytosine bases remain unchanged. In a 100% successful bisulfite pretreatment, a complete conversion of all unmethylated cytosine bases into uracil bases takes place. During subsequent hybridization steps, uracil bases behave as thymine bases, in that they form Watson-Crick base pairs with adenine bases. Only cytosine bases that are located in a CpG position (i.e., in a 5′-CG-3′ dinucleotide), are known to be possibly methylated (known to be normally methylatable in vivo). Therefore all other cytosines, not located in a CpG position, are unmethylated and are thus transformed into uracils that will pair with adenine during amplification cycles, and as such will appear as thymine bases in an amplified product (e.g., in a PCR product). Whenever a bisulfite-treated nucleic acid is amplified and/or sequence analyzed, the positions that appear as thymines in the sequence can either indicate a true thymine position or a (transformed or converted) cytosine position. These can only be distinguished by comparing the bisulfite sequence data with the untreated genomic sequence data that is already known.

[0172] However, cytosines in CpG positions must be regarded as potentially methylated, more precisely as potentially differentially methylated. Significantly, a 100% cytosine or 100% thymine signal at a CpG position will be rare, because biological samples always contain some kind of background DNA. Therefore, according to the inventive methods, the ratio of thymine to cytosine appearing at a specific CpG position is determined as accurately as possible. This is enabled, for example, by using the sequencing evaluation software tool ESME, which takes into account the falsification or bias of this ratio caused by incomplete conversion (see herein below, and see application EP 02 090 203, incorporated herein by reference.

Primer Design

[0173] Preferably, the bisulfite-pretreated DNA is not directly sequenced, but amplified first. Primer molecules are designed that will be utilized to amplify regions of interest (ROI). It is particularly preferred that the regions of interest are amplified by means of a polymerase chain reaction. This ensures that sufficient material for a qualitative automated sequencing process can be provided. Primer molecules for the amplification must be carefully designed, because priming at a genomic CpG position (i.e., a 5′-tG-3′, or 5′-CG-3′, or 5′-Ca-3′ dinucleotide in the bisulfite sequence) must be avoided (a capital T is used to indicate a thymine position that was a thymine prior to pretreatment, whereas a “t” is used to indicate a thymine at a cytosine position, whenever the cytosine was transformed to uracil by pretreatment and “a” is used to indicate the adenine corresponding to such a thymine located at a cytosine position). Primer molecules that cover a genomic CpG position when binding to the bisulfite-pretreated nucleic acids will introduce a bias towards amplifying one methylation status only, because they distinguish between ‘prior-to-pretreatment’ methylated and unmethylated nucleic acids as templates. Preferably, therefore, inventive unbiased primer molecules that are used to amplify nucleic acids pretreated with bisulfite consist of three different nucleotides only (i.e., A, T and C), and preferably only comprise a 5′-CA-3′ sequence if that corresponding complementary 5′-TG-3′ sequence was known to be a 5′-TG-3′ sequence prior to pretreatment, as, for example, the bisulfite pretreatment.

[0174] Preferably, therefore, the inventive primer molecules are designed not to cover any CpG position, to avoid a bias in amplification.

[0175] More details about the preferred primer design, especially if multiplex PCR experiments are performed on bisulfite treated nucleic acids, are found in German Patent Application DE 102 36 406, filed 02 Aug. 2002, and filed as a PCT application in English both of which are incorporated herein by reference.

[0176] Generally, the sense strand or the minus strand of the genomic DNA can be utilized to analyze the methylation levels of CpG positions within a genomic sequence. After bisulfite treatment, these strands differ from each other to such an extent that they are not corresponding (complementary) anymore, and they do not hybridize efficiently to each other. These are referred to herein as BISU 1 and BISU 2. Both can be used for methylation analysis, and that is why both strands are encompassed withing the teachings of the present invention. As the bisulfite sequences also differ depending on their prior corresponding genomic methylation status, both BISU sequences are disclosed once as up-methylated (every 5′-CG-3′ is methylated) and once as down-methylated (every 5′-CG-3′ is unmethylated). Accordingly, four bisulfite sequences are disclosed per genomic ROI.

[0177] In the sequence protocol herein, the two strands of the up-methylated versions of all 34 ROIs from EXAMPLE 1 are given first (SEQ ID NOS:1-68), where the odd numbers indicate the BISU 1, and the even numbers name the BISU 2 sequences. These are followed by the sequences of the corresponding down methylated versions of said ROIs (SEQ ID NOS:69-136). Again, the odd numbers indicate BISU 1 and even numbers indicate BISU 2 sequences. Nucleic acids and oligomers comprising a contiguous sequence of a length of at least 16 nucleotides or more (or at least 18, 20, 22, 23, 25, 30, or 35) nucleotides that hybridize under moderately stringent or stringent conditions to any of these four sequences can be used to analyze the methylation levels of specific CpGs or methylation patterns of short stretches of the nucleic acid within these regions of interest (ROI).

[0178] Designing primer molecules for only one of the strands, provides for a selection towards one strand. Amplification of the BISU1 version of the ROI is afforded by using a set of primer molecules designed for the bisulfite-treated sense strand BISU 1. These amplificates are typically just as useful for the determination of methylation levels at a genomic CpG position as amplificates of BISU 2. Therefore, it is understood that the scope of this application is not limited by describing the primer molecules that have been used for the analysis of only one strand.

[0179] The amplificates obtained are analyzed by sequencing as described in the next step. The double-stranded DNA amplificates (e.g., obtained by PCR) contain a thymine instead of an unmethylated cytosine in one strand and, correspondingly, an adenine in the inversely complementary strand. Consequently, by determining the thymine signal intensities at original cytosine positions in CpG position, the fraction of unmethylated cytosines can be determined at this CpG position in the present mixture. Each amplificate is bisulfite sequenced once from both ends, and in particularly preferred embodiments two sequence traces are generated thereby.

[0180] Sequencing primers may be designed specifically for that purpose, although it is preferred that if a PCR is employed to amplify the regions of interest, the original PCR amplification primers are used as the sequencing primers.

[0181] Preferably, both of these two sequence traces are analyzed with one or more algorithms or a software program that considers or accounts for any unequal distribution of bases in bisulfite-converted DNA and that normalizes the sequence traces (electropherograms) to allow for quantitation of methylation signals within the sequence traces. Preverably, the program is ESME as is described in detail in the following part, or is a functional equivalent thereof. Preferably, an average value from both of these traces for the methylation level at one CpG is calculated for every CpG position in the analyzed region.

[0182] Averaged values for a number (between 5 and 32) of analyzed CpG positions in each of 34 ROIs are shown in EXAMPLE 1, herein below (see FIGS. 1-34, and Tables 3-36).

DNA Sequencing

[0183] According to the present invention, generating a genome-wide methylation map requires several thousand PCR amplificates and about twice as many sequence reads are produced and analyzed for differential methylation. Preferably, the amplificates of the pretreated nucleic acids are first sequenced according to the chain-termination method as described by Sanger et al. (Sanger F, et al., Proc Natl Acad Sci USA 74: 5463-5467, 1977), slightly adapted for bisulfite sequencing (Feil R, et al., Nucleic Acids Res. 22: 695-6, 1994)

[0184] The labeled reaction products are subsequently analyzed according to their size either in spatially separated lanes, or by different color labels distinguishable within one lane. For example, four different fluorescently-labeled ddNTPs may be used, but it is also possible to limit the analysis to the determination of fewer than four base sequences.

[0185] The sequence analysis results in an electropherogram which can only be used for a qualitative determination of the base sequence. With the use of the preferred sequence data evaluation tool ESME however, or a functional equivalent thereof, quantitative information with respect to the level of methylation of a cytosine can also be obtained from this electropherogram, and from the comparison of these data with the original sequence; that is, with the sequence of the corresponding DNA region not treated with bisulfite.

ESME

[0186] ESME calculates methylation levels at particular CpG positions by comparing signal intensities, and correcting for incomplete bisulphite conversion. ESME scores all cytosines (=methylated C) and C→T transitions (=non-methylated C) in bisulphite sequence traces, and furthermore calculates the % of methylation for all CpG sites. It allows the analysis of DNA mixtures both in individual cells as well as of DNA mixtures from a plurality of cells. The method can be applied to any bisulfite-pretreated nucleic acid for which the genomic nucleotide sequence of the corresponding DNA region not treated with bisulfite is known, and for which a sequence electropherogram (trace) can also be generated.

[0187] ESME utilizes the electropherograms for standardizing the average signal intensity of at least one base type (C, T, A or G) against the average signal intensity which is obtained for one or more of the remaining base types. Preferably, the cytosine signal intensities are standardized relative to the thymine signal intensities, and the ratio of the average signal intensity of cytosine to that of thymine is determined.

[0188] The average of a signal intensity is calculated by taking into account the signal intensities of several bases, which are present in a randomly defined region of the amplificate. The average of a plurality of positions of this base type is determined within an arbitrarily defined region of the amplificate. This region can comprise the entire amplificate, or a portion thereof.

[0189] Significantly, such averaging leads to mathematically reasonable and/or statistically reliable values.

[0190] Additionally, a basic feature of ESME comprises calculation of a ‘conversion rate’ (fcoN) of the conversion of cytosine to uracil (as a consequence of bisulfite treatment), based upon the standardized signal intensities. This is characterized as the ratio of at least one signal intensity standardized at positions which modify their hybridization behavior due to the pretreatment, to at least one other signal intensity. Preferably, it is the ratio of unmethylated cytosine bases, whose hybridization behavior was modified (into the hybridization behavior of thymine) by bisulfite treatment, to all unmethylated cytosine bases, independent of whether their hybridization behavior was modified or not, within a defined sequence region. The region to be considered can comprise the length of the total amplificate, or only a part of it, and both the sense sequence or its inversely-complementary sequence can be utilized therefore.

[0191] The calculation of standardizing factors, for standardizing signal intensities, as well as the calculation of a conversion rate are based on accurate knowledge of signal intensities. Preferably, such knowledge is as accurate as possible.

[0192] An electropherogram represents a curve that reflects the number of detected signals per unit of time, which in turn reflects the spatial distance between two bases (as an inherent characteristic of the sequencing method). Therefore, the signal intensity and thus the number of molecules that bear that signal can be calculated by the area under the peak (i.e., under the local maximum of this curve). The considered area is best described by integrating this curve. Such area measurements are determined by the integration limits X₁ and X₂; X₁, lying to the left of the local maximum, and by X₂, lying to the right of the local maximum.

[0193] Another basic feature of ESME is that it affords the determination of the actual methylation number f_{MET}, (“actual” as in significantly closer to reality than assuming the conversion rate is, e.g., 95%). Both, the standardized signal intensities as well as the conversion rates f_{CON} (obtained by considering said standardized signal intensities) are used for calculation of the actual degree (level) of methylation of a cytosine position in question.

[0194] According to a preferred embodiment, the % methylation levels are calculated by ESME, or an equivalent thereof, for all CpG positions representing the genome, and the information is linked to corresponding positions in the latest assembly of the human genome sequence, and be sorted according to tissue and disease state. In preferred embodiments, this information is made available for further research. In a particularly preferred embodiment, the information is utilized directly to provide specific markers for DNA derived from specific cell types (e.g., see EXAMPLE 1 herein below).

[0195] The methylation data, including the quantitative aspects thereof, is easily presented in a user friendly two-dimensional display, allowing for immediate identification of differentiating patterns. For example, the location of a CpG position within the genome is displayed along one axis, whereas the sample type is displayed along the other axis. When grouping the phenotypically distinct sample types side-by-side, methylation differences can be displayed in the field created by the two axes. Based on this visualized display, methylation variable positions (MVPs) can be identified (e.g., by eye) and it becomes easy to select the ROIs that can be utilized as effective markers. The exact location of the methylation variable positions i.e., the CpG positions that are differentially methylated between or among different groups of phenotypically distinct cell types could also be disclosed and analyzed using such a display.

Utility

[0196] Embodiments of the present invention have specific and substantial utility for any researcher involved with DNA analysis, including but not limited to technical developers, medicinal researchers, criminal investigators, and forensics scientists. The inventive methods and tools disclosed herein are extremely useful, for example in identifying the source of DNA found in a bodily fluid or DNA found at a crime scene, or more specifically, from which organ or tissue type the DNA originates from.

[0197] In additional embodiments the inventive markers are arranged as an appropriate set on a chip surface, and used to simultaneously detect specific methylation degrees (levels) of a large number of MVPs. The term ‘appropriate’ in this context is defined by the specificity of the markers used and their correlation towards the question raised. Such embodiments are particularly useful where the origin of DNA must be identified without any prior knowledge as to where it may have originated from. For these cases, sets of markers that are analyzed for their methylation degrees can create fingerprints or patterns that lead to a accurate identification of the DNA's origin.

[0198] However, according to the present invention, the use of a single marker ROI is often sufficient if the problem at hand involves distinguishing between two specific tissues in question. Likewise, if analysis of only a few different marker ROI will give sufficient information towards an unambiguous decision, any kind of methylation analysis assay, that allows for determination of the methylation levels at specific locations is sufficient. Such assays could be based on methylation-sensitive restriction enzyme assays, given that the informative MVPs were located in an appropriate recognition motif sequence. Alternatively, the assay could be based on bisulfite-pretreated DNA, or on DNA subjected to other pretreatments distinguishing between methylated and unmethylated cytosines. The pretreated DNA can then be analyzed by means of sequencing the pretreated DNA or by means of assays based on bisulfite sequencing (for example pyrosequencing or MS-SNuPE™). The pretreated DNA can also be analyzed by means of methylation-specific ligation assays, amplification with methylation specific primers (MSP), amplification using methylation-specific blockers (HM; HeavyMethyl™) or by methylation-specific detection of PCR products (MethyLight™), or by any combinations thereof.

[0199] The so-called HeavyMethyl™ (HM) assay comprises the use of at least one blocking oligomer; that is, a nucleic acid molecule or peptide nucleic acid molecule, comprising in each case a contiguous sequence at least 9 nucleotides in length that is complementary to, or hybridizes under moderately stringent or stringent conditions to a sequence comprising a CG, TG or CA dinucleotide, that was a CG dinucleotide prior to pretreatment, wherein hybridization of said nucleic acid to a target sequence hinders the amplification of the target sequence.

[0200] Preferably, this blocking oligomer is in each case modified at the 5′-end thereof to preclude degradation by an enzyme having 5′-3′ exonuclease activity. Preferably, said blocking oligomer is in each case lacking a 3′ hydroxyl group.

[0201] All of these methylation assay techniques are known and sufficiently described in the prior art.

[0202] The present invention is based, at least in part, on the discovery that quantitative measurements of the methylation levels of several genomic regions can be performed in a fast and high-throughput style on different sample types resulting in easily identifiable biomarkers.

[0203] In one embodiment, the present invention therefore provides a method for generating a genome-wide methylation map (epigenomic map) by identifying a significant number of methylation variable positions (MVPs) within the human genome, comprising several steps:

[0204] First, is collecting a number of phenotypically distinct biological samples, wherein such samples can be derived from different types of tissue, organs, bodily fluids or cells, or from patients suffering from different diseases, or from patients suffering from one disease, but to different degrees, and wherein such samples are characterized in containing genomic DNA.

[0205] Secondly, said genomic DNA is pretreated, before or after isolation and/or purifying, by contacting them with an agent, or series of agents, that modifies unmethylated cytosine, but does not modify methylated cytosines at all, or at least in the same manner.

[0206] Thirdly, segments of genomic regions, representing the whole or a chosen part of the genome, and each comprising at least one CpG position are amplified;wherein a CpG position is the position of a CG or TG dinucleotide, which was a CG dinucleotide prior to performing pretreatment in step two, and wherein said amplification is carried out using the pretreated nucleic acid as the template by means of primer molecules that do not distinguish between initially methylated and initially unmethylated DNA. This step is performed separately for every type of phenotypically distinct biological sample in question.

[0207] In a fourth step, said amplified pretreated nucleic acids are sequence analyzed.

[0208] In a fifth step, the sequence traces (e.g., electropherograms) derived for every type of biological sample are analyzed, to determine the quantitative level of methylation at several specific CpG positions, creating a pattern of the levels of methylation over said whole or said chosen part of the genome.

[0209] Next, said levels of methylation at several specific CpG positions are compared between different groups of at least two types of biological samples, and methylation variable positions (MVP) are identified, wherein a MVP comprises a CpG position, for which a difference in methylation levels can be detected between different types of biological samples.

[0210] Preferably, determining the quantitative level of methylation at several specific CpG positions, comprises the algorithms and principle ideas underlying the software program ESME™, or a functional equivanent thereof, as used for analysis of the sequence traces.

[0211] Preferably, pretreatment in step 2 comprises conversion of unmethylated cytosine to uracil, whereas methylated cytosine is not converted by said pretreatment.

[0212] It is also preferred that the agent, or series of agents of step 2 comprises a bisulfite reagent.

[0213] It is alternately preferred that the agent, or series of agents in step 2 comprises an enzyme, such as a cytidine deaminase.

[0214] Preferably, the genomice DNA segments selected in step 3 are located in or near the 5′-regulatory region of a gene.

[0215] It is particularly preferred that the amplifying step is by polymerase chain reaction (PCR).

[0216] Addtionaly embodiments of this invention comprise a nucleic acid or an oligomer, comprising at least one contiguous base sequence having a length of at least 16 nucleotides (or at least 18, 20, 22, 23, 25, 30 or 35 nucleotides), which is complementary to, or hybridizes under moderately stringent or stringent conditions to a pretreated genomic DNA selected from a group consisting of SEQ ID NOS:1-136, and sequences complementary thereto, wherein said nucleic acid or oligomer sequence comprises at least one methylation variable position.

[0217] These nucleotides and oligomers are extremely useful to analyze the methylation levels of said MVPs, for example, in sequencing analysis or in other quantifying assays, which detect the ratio of methylated versus non-methylated nucleotides (e.g., a MSP assay, employing methylation-sensitive primer molecules comprising at least one MVP, or a HeavyMethyl™ assay, employing methylation sensitive blocking oligonucleotides (as described in detail in WO 02/072880) or a MethyLight™ assay employing methylation sensitive detection oligonucleotides).

[0218] Another embodiment of this invention comprises a set of two oligomers that allows the generation of nucleic acid amplificates, wherein a first oligomer comprises at least one contiguous base sequence of at least 16 nucleotides in length (or at least 18, 20, 22, 23, 25, 30 or 35 nucleotides), which is complementary to, or hybridizes under moderately stringent or stringent conditions to a pretreated genomic DNA sequence selected from the group consisting of SEQ ID NOS:1-136, and the second oligomer comprises in each case at least one contiguous base sequence of at least 16 nucleotides in length (or at least 18, 20, 22, 23, 25, 30 or 35 nucleotides), which is essentially identical to said pretreated genomic DNA sequence selected from the group consisting of SEQ ID NOS:1-136, respectively.

[0219] Examples of inventive oligonucleotides of length X (in nucleotides), as indicated by polynucleotide positions with reference to, e.g., SEQ ID NO:1, include those corresponding to sets (e.g., sense and antisense) of consecutively overlapping oligonucleotides of length X, where the oligonucleotides within each consecutively overlapping set (corresponding to a given X value) are defined as the finite set of Z oligonucleotides from nucleotide positions:

[0220] n to (n+(X−1));

[0221] where n=1, 2, 3, . . . (Y−(X−1));

[0222] where Y equals the length (nucleotides or base pairs) of SEQ ID NO:1 (2,500);

[0223] where X equals the common length (in nucleotides) of each oligonucleotide in the set (e.g., X=20 for a set of consecutively overlapping 20-mers); and

[0224] where the number (Z) of consecutively overlapping oligomers of length X for a given SEQ ID NO of length Y is equal to Y−(X−1). For example Z=2,500−19=2,481 for either sense or antisense sets of SEQ ID NO:1, where X=20.

[0225] In particular embodiments, preferred sets are those limited to those oligomers that comprise at least one CpG, tpG or Cpa dinucleotide.

[0226] Examples of inventive 20-mer oligonucleotides include the following set of 2,481 oligomers (and the complementary antisense set), indicated by polynucleotide positions with reference to SEQ ID NO:1:

[0227] 1-20, 2-21, 3-22, 4-23, 5-24 . . . 2,480-2,498, 2,481-2,499 and 2,481-2,500.

[0228] In particular embodiments, preferred sets are those limited to those oligomers that comprise at least one CpG, tpG or Cpa dinucleotide.

[0229] The present invention encompasses, for each of SEQ ID NO:1 to SEQ ID NO:136 (sense and antisense), multiple consecutively overlapping sets of oligonucleotides or modified oligonucleotides of at least length X, where, e.g., X=9, 10, 17, 18, 20, 22, 23, 25, 27, 30 or 35 nucleotides.

[0230] The oligonucleotides of the invention can also be modified by chemically linking the oligonucleotide to one or more moieties or conjugates to enhance the activity, stability or detection of the oligonucleotide. Such moieties or conjugates include chromophores, fluorophors, lipids such as cholesterol, cholic acid, thioether, aliphatic chains, phospholipids, polyamines, polyethylene glycol (PEG), palmityl moieties, and others as disclosed in, for example, U.S. Pat. Nos. 5,514,758, 5,565,552, 5,567,810, 5,574,142, 5,585,481, 5,587,371, 5,597,696 and 5,958,773. The probes may also exist in the form of a PNA (peptide nucleic acid) which has particularly preferred pairing properties. Thus, the oligonucleotide may include other appended groups such as peptides, and may include hybridization-triggered cleavage agents (Krol et al., BioTechniques 6:958-976, 1988) or intercalating agents (Zon, Pharm. Res. 5:539-549, 1988). To this end, the oligonucleotide may be conjugated to another molecule, e.g., a chromophore, fluorophor, peptide, hybridization-triggered cross-linking agent, transport agent, hybridization-triggered cleavage agent, etc.

[0231] The oligonucleotide may also comprise at least one art-recognized modified sugar and/or base moiety, or may comprise a modified backbone or non-natural internucleoside linkage.

[0232] In preferred embodiments, at least one, and more preferably all members of a set of oligonucleotides is bound to a solid phase.

[0233] In particular embodiments, it is preferred that an arrangement of different oligonucleotides and/or PNA-oligomers (a so-called “array”), made according to the present invention, is present in a manner that it is likewise bound to a solid phase. Such an array of different oligonucleotide- and/or PNA-oligomer sequences can be characterized, for example, in that it is arranged on the solid phase in the form of a rectangular or hexagonal lattice. The solid-phase surface is preferably composed of silicon, glass, polystyrene, aluminum, steel, iron, copper, nickel, silver, or gold. However, nitrocellulose as well as plastics such as nylon, which can exist in the form of pellets or also as resin matrices, may also be used.

[0234] Therefore, in further embodiments, the present invention provides a method for manufacturing an array fixed to a carrier material for analysis in connection with, for example, identification of cell or tissue types, or distinguishing one cell or tissue type among others, in which method at least one oligomer according to the present invention is coupled to a solid phase. Methods for manufacturing such arrays are known and described in, for example, U.S. Pat. No. 5,744,305 by means of solid-phase chemistry and photo labile protecting groups.

[0235] The present invention further provides a DNA chip for the analysis of, for example, identification of cell or tissue types, or for distinguishing one cell or tissue type among others. DNA chips are known and described in, for example, U.S. Pat. No. 5,837,832.

[0236] Especially preferred, is a nucleic acid or oligomer, consisting essentially of one of the sequences selected from the group consisting of SEQ ID NO:137 to SEQ ID NO:204. These preferred nucleic acid molecules were used as primer molecules in EXAMPLE 1, herein below, to generate amplificates that comprise at least two MVPs, and which can be used to differentiate tissues by for example sequencing said amplificates.

[0237] Another embodiment of this invention comprises a method for identifying a specific type of cells out of a group of other chosen cell types as the source of a nucleic acid analyzed, comprising determination of methylation state or the level of methylation of one or more MVPs within any sequence of the MHC selected from the group consisting of SEQ ID NO:205, a fragment thereof at least 16 (or at least 18, 20, 22, 23, 25, 30 or 35 nucleotides) contiguous nucleotides in length, and sequences that are complementary to, or hybridize under moderately stringent or stringent conditions to SEQ ID NO:205 or to a fragment thereof at least 16 (or at least 18, 20, 22, 23, 25, 30 or 35 nucleotides) contiguous nucleotides in length.

[0238] Preferably, said state or level of methylation is analyzed and determined by utilizing a nucleic acid or an oligomer comprising at least one base contiguous sequence having a length of at least 16 nucleotides (or at least 18, 20, 22, 23, 25, 30 or 35 nucleotides), which is complementary to, or hybridizes under moderately stringent or stringent conditions to a pretreated genomic DNA sequence selected from the group consisting of SEQ ID NOS:1-136, or sequences complementary thereto.

[0239] It is particularly preferred that said state or level of methylation is analyzed by utilizing a nucleic acid or an oligomer comprising at least one contiguous base sequence having a length of at least 16 nucleotides (or at least 18, 20, 22, 23, 25, 30 or 35 nucleotides), which is complementary to, or hybridizes under moderately stringent or stringent conditions to a pretreated genomic DNA according to SEQ ID NOS:1-136, and sequences complementary thereto, wherein said nucleic acid or oligomer sequence comprises at least one methylation variable position.

[0240] It is also preferred that said state or level of methylation is analyzed by a method comprising utilizing a methylation-sensitive restriction enzyme analysis assay, and utilizing one or several of the 34 genomic nucleic acid sequences, or fragments thereof, corresponding to SEQ ID NOS:1-136, wherein said genomic sequences comprise at least one CpG position.

[0241] Another embodiment of this invention comprises a method for identifying liver DNA, cells or tissue, or for distinguishing liver cells among a group of other chosen cell or tissue types as the source of an analyzed nucleic acid, comprising analysis of the state or level of methylation of one or more MVPs utilizing a nucleic acid or an oligomer comprising at least one contiguous base sequence having a length of at least 16 nucleotides (or at least 18, 20, 22, 23, 25, 30 or 35 nucleotides), which is complementary to, or hybridizes under moderately stringent or stringent conditions to a pretreated genomic DNA according to SEQ ID NOS:1, 2, 69, 70; 7, 8, 75, 76; 9, 10, 77, 78; 11, 12, 79, 80; 13, 14, 81, 82; 25, 26, 93, 94; 35, 36, 103, 104; 37, 38, 105, 106; 51, 52, 119, 120; 53, 54, 121, 122; 59, 60, 127 and 128, and sequences complementary thereto.

[0242] It is particularly preferred that said nucleic acid or oligomer sequence comprises at least one methylation variable position (MVP).

[0243] Another embodiment of this invention comprises a method for identifying brain DNA, cells or tissue, or for distinguishing brain cells among a group of other chosen cell or tissue types as the source of an analyzed nucleic acid, comprising analysis of the state or level of methylation of one or more MVPs utilizing a nucleic acid or an oligomer comprising at least one contiguous base sequence having a length of at least 16 nucleotides (or at least 18, 20, 22, 23, 25, 30 or 35 nucleotides), which is complementary to, or hybridizes under moderately stringent or stringent conditions to a pretreated genomic DNA according to SEQ ID NOS:3, 4, 71, 72; 17, 18, 85, 86; 49, 50, 117, 118; 61, 62, 129 and 130, and sequences complementary thereto.

[0244] It is particularly preferred that said nucleic acid or oligomer sequence comprises at least one methylation variable position (MVP).

[0245] Another embodiment of this invention comprises a method for identifying breast DNA, cells or tissue, or for distinguishing breast cells among a group of other chosen cell or tissue types as the source of an analyzed nucleic acid, comprising an analysis of the state or level of methylation of one or more MVPs utilizing a nucleic acid or an oligomer comprising at least one contiguous base sequence having a length of at least 16 nucleotides (or at least 18, 20, 22, 23, 25, 30 or 35 nucleotides), which is complementary to, or hybridizes under moderately stringent or stringent conditions to a pretreated genomic DNA according to SEQ ID NOS:3, 4, 71, 72; 5, 6, 73, 74; 15, 16, 83, 84; 23, 24, 91, 92; 41, 42, 109, 110; 65, 66, 133 and 134, and sequences complementary thereto.

[0246] It is particularly preferred that said nucleic acid or oligomer sequence comprises at least one methylation variable position (MVP).

[0247] Another embodiment of this invention comprises a method for identifying muscle DNA, cells or tissue, or for distinguishing muscle cells among a group of other chosen cell or tissue types as the source of an analyzed nucleic acid, comprising analysis of the state or level of methylation of one or more MVPs utilizing a nucleic acid or an oligomer comprising at least one contiguous base sequence having a length of at least 16 nucleotides (or at least 18, 20, 22, 23, 25, 30 or 35 nucleotides), which is complementary to, or hybridizes under moderately stringent or stringent conditions to a pretreated genomic DNA according to SEQ ID NOS:15, 16, 83, 84; 43, 44, 111, 112; 47, 48, 115 and 116, and sequences complementary thereto.

[0248] It is particulary preferred that said nucleic acid or oligomer sequence comprises at least one methylation variable position (MVP).

[0249] Another embodiment of this invention comprises a method for identifying lung DNA, cells or tissue, or for distinguishing lung cells or tissue among a group of other chosen cell or tissue types as the source of an analyzed nucleic acid, comprising analysis of the state or level of methylation of one or more MVPs utilizing a nucleic acid or an oligomer comprising at least one contiguous base sequence having a length of at least 16 nucleotides (or at least 18, 20, 22, 23, 25, 30 or 35 nucleotides), which is complementary to, or hybridizes under moderately stringent or stringent conditions to a pretreated genomic DNA according to SEQ ID NOS:31, 32, 99, 100; 33, 34, 101 and 102, and sequences complementary thereto.

[0250] It is particularly preferred that said nucleic acid or oligomer sequence comprises at least one methylation variable position (MVP).

[0251] Another embodiment of this invention comprises a method for identifying the DNA, cells or tissues of breast or muscle, or for distinguishing breast or muscle cells or tissue out of a group of other chosen cell or tissue types as the source of an analyzed nucleic acid, comprising analysis of the state or level of methylation of one or more MVPs utilizing a nucleic acid or an oligomer comprising at least one contiguous base sequence having a length of at least 16 nucleotides (or at least 18, 20, 22, 23, 25, 30 or 35 nucleotides), which is complementary to, or hybridizes under moderately stringent or stringent conditions to a pretreated genomic DNA according to SEQ ID NOS:45, 46, 113, 114; 63, 64, 131, and 132, and sequences complementary thereto.

[0252] It is particularly preferred that said nucleic acid or oligomer sequence comprises at least one methylation variable position (MVP).

[0253] Another embodiment of this invention comprises a method for identifying brain or muscle DNA, cells or tissue, or for distinguishing brain or muscle cells or tissue among a group of other chosen cell types as the source of an analyzed nucleic acid, comprising analysis of the state or level of methylation of one or more MVPs utilizing a nucleic acid or an oligomer comprising at least one contiguous base sequence having a length of at least 16 nucleotides (or at least 18, 20, 22, 23, 25, 30 or 35 nucleotides), which is complementary to, or hybridizes under moderately stringent or stringent conditions to a pretreated genomic DNA according to SEQ ID NOS:57, 58, 125 and 126, and sequences complementary thereto.

[0254] It is particularly preferred that said nucleic acid or oligomer sequence comprises at least one methylation variable position (MVP).

[0255] Another embodiment of this invention comprises a method for identifying brain or breast DNA, cells or tissues, or for distinguishing brain or breast cells or tissue among a group of other chosen cell types as the source of an analyzed nucleic acid, comprising analysis of the state or level of methylation of one or more MVPs utilizing a nucleic acid or an oligomer comprising at least one contiguous base sequence having a length of at least 16 nucleotides (or at least 18, 20, 22, 23, 25, 30 or 35 nucleotides), which is complementary to, or hybridizes under moderately stringent or stringent conditions to a pretreated genomic DNA according to SEQ ID NOS:67, 68, 135, 136, and sequences complementary thereto.

[0256] It is particularly preferred that said nucleic acid or oligomer sequence comprises at least one methylation variable position (MVP).

[0257] Another embodiment of this invention comprises a method for identifying breast or lung DNA, cells or tissues, or for distinguishing breast or lung cells or tissue among a group of other chosen cell types as the source of an analyzed nucleic acid, comprising analysis of the state or level of methylation of one or more MVPs utilizing a nucleic acid or an oligomer comprising at least one contiguous base sequence having a length of at least 16 nucleotides (or at least 18, 20, 22, 23, 25, 30 or 35 nucleotides), which is complementary to, or hybridizes under moderately stringent or stringent conditions to a pretreated genomic DNA according to SEQ ID NOS:17, 18, 85, 86, and sequences complementary thereto.

[0258] It is particularly preferred that said nucleic acid or oligomer sequence comprises at least one methylation variable position (MVP).

[0259] Another embodiment of this invention comprises a method for distinguishing lung from muscle cells or tissue as the source of an analyzed nucleic acid, comprising analysis of the state or level of methylation of one or more MVPs utilizing a nucleic acid or an oligomer comprising at least one contiguous base sequence having a length of at least 16 nucleotides (or at least 18, 20, 22, 23, 25, 30 or 35 nucleotides), which is complementary to, or hybridizes under moderately stringent or stringent conditions to a pretreated genomic DNA according to SEQ ID NOS:55, 56, 123 and 124, and sequences complementary thereto.

[0260] It is particularly preferred that said nucleic acid or oligomer sequence comprises at least one methylation variable position (MVP).

[0261] Another embodiment of this invention comprises a method for distinguishing brain, breast and muscle cells or tissue from liver, lung and prostate cells or tissue as the source of an analyzed nucleic acid, comprising analysis of the state or level of methylation of one or more MVPs utilizing a nucleic acid or an oligomer comprising at least one contiguous base sequence having a length of at least 16 nucleotides (or at least 18, 20, 22, 23, 25, 30 or 35 nucleotides), which is complementary to, or hybridizes under moderately stringent or stringent conditions to a pretreated genomic DNA according to SEQ ID NOS:19, 20, 87 and 88, and sequences complementary thereto.

[0262] It is particularly preferred that said nucleic acid or oligomer sequence comprises at least one methylation variable position (MVP).

[0263] Another embodiment of this invention comprises a method for distinguishing brain, breast and muscle cells or tissue from lung and prostate cells or tissue as the source of analyzed nucleic acid, comprising analysis of the state or level of methylation of one or more MVPs utilizing a nucleic acid or an oligomer comprising at least one contiguous base sequence having a length of at least 16 nucleotides (or at least 18, 20, 22, 23, 25, 30 or 35 nucleotides), which is complementary to, or hybridizes under moderately stringent or stringent conditions to a pretreated genomic DNA according to SEQ ID NOS:29, 30, 97 and 98, and sequences complementary thereto.

[0264] It is particularly preferred that said nucleic acid or oligomer sequence comprises at least one methylation variable position (MVP).

[0265] Another embodiment of this invention comprises a method for distinguishing liver, breast and muscle cells or tissue from brain and lung cells or tissue as the source of an analyzed nucleic acid, comprising analysis of the state or level of methylation of one or more MVPs utilizing a nucleic acid or an oligomer comprising at least one contiguous base sequence having a length of at least 16 nucleotides (or at least 18, 20, 22, 23, 25, 30 or 35 nucleotides), which is complementary to, or hybridizes under moderately stringent or stringent conditions to a pretreated genomic DNA according to SEQ ID NOS:21, 22, 89 and 90, and sequences complementary thereto.

[0266] It is particularly preferred that said nucleic acid or oligomer sequence comprises at least one methylation variable position (MVP).

[0267] Another embodiment of this invention comprises a method for distinguishing liver and muscle cells or tissue from brain and breast cells or tissue as the source of an analyzed nucleic acid, comprising analysis of the state or level of methylation of one or more MVPs utilizing a nucleic acid or an oligomer comprising at least one contiguous base sequence having a length of at least 16 nucleotides (or at least 18, 20, 22, 23, 25, 30 or 35 nucleotides), which is complementary to, or hybridizes under moderately stringent or stringent conditions to a pretreated genomic DNA according to SEQ ID NOS:27, 28, 95 and 96 and sequences complementary thereto.

[0268] It is particularly preferred that said nucleic acid or oligomer sequence comprises at least one methylation variable position (MVP).

[0269] Another embodiment of this invention comprises a method for distinguishing brain, liver and lung cells or tissues from prostate and breast cells or tissues as the source of an analyzed nucleic acid, comprising analysis of the state or level of methylation of one or more MVPs utilizing a nucleic acid or an oligomer comprising at least one contiguous base sequence having a length of at least 16 nucleotides (or at least 18, 20, 22, 23, 25, 30 or 35 nucleotides), which is complementary to, or hybridizes under moderately stringent or stringent conditions to a pretreated genomic DNA according to SEQ ID NOS:39, 40, 107 and 108, and sequences complementary thereto.

[0270] It is particulary preferred that said nucleic acid or oligomer sequence comprises at least one methylation variable position (MVP).

### EXAMPLE 1

### MVPs and Markers Comprising Multiple MVPs in the Major Histocompatability Complex (MHC) were Identified According to Methods of the Present Invention

[0271] The selected loci of this example are all located within the major histocompatability complex (MHC), as is disclosed in SEQ ID NO:205.

[0272] Cloned DNA cannot be used for sequencing for present purposes, because the methylation information is lost during cloning. Therefore, protocols for the design of primers and for the generation of amplificates of genes within the MHC were developed. Available sequence information from the MHC was used for this purpose, and specific primer-sets were designed to be used to amplify (gene-derived) fragments or regions comprising putative variable methylation information. The amplificates were obtained in multiplex PCR experiments, and the primer molecules designed therefore (see herein above) are listed in Table 1, and referring to the sequence protocol SEQ ID NO:137 through SEQ ID NO:204 (see Sequence Listing).

[0273] Table 1 lists the SEQ ID numbers of the primer pairs that were used to amplify specific regions of the pretreated DNA (third column), according to the ROI identifier number (listed in the first column). The ROI identifier number links the sequence information (as given in Table 2, below, as ROI SEQ ID numbers) with information (given in Tables 3-36 and FIGS. 1-34) about the methylation levels measured at the majority of CpG sites within these regions and specifically with information about the methylation levels at specific methylation variable CpG sites (MVP) within these regions.

[0274] The second column in Table 1 gives the name of the gene to which the genomic sequence analyzed is related, as the ROI may either lie within the gene, or close to its 5′-end. If no gene name is known, the name of the genomic clone is given instead. The regions amplified with primers, as disclosed herein, comprise one or more MVPs (i.e., differentially methylated CpG positions). The last two columns of Table 1 provide the SEQ ID numbers of those 2 versions of said ROI that can be used as template for the respective specific primer pair.

TABLE 1

| | | | | | amplificate | |
|---|---|---|---|---|---|---|
| | | | | | located within | |
| | | | | | ROI SEQ ID | |
| ROI | related gene | primer | FIG. no | | up and down | |
| identifier | name | SEQ ID | \overline{Table no} | strand | methylated | |
| 3083 | BF | 137 | 1 | BISU 2 | 2 | 70 |
| | | 138 | 3 | | | |
| 3084 | BF | 139 | 2 | BISU 2 | 4 | 72 |
| | | 140 | 4 | | | |
| 3091 | C2 | 141 | 3 | BISU 2 | 6 | 74 |
| | | 142 | 5 | | | |
| 3093 | C4B | 143 | 4 | BISU 1 | 7 | 75 |
| | | 144 | 6 | | | |
| 3094 | C4B | 145 | 5 | BISU 2 | 10 | 78 |
| | | 146 | 7 | | | |
| 3103 | CYP21A2 | 147 | 6 | BISU 2 | 12 | 80 |
| | | 148 | 8 | | | |
| 3104 | CYP21A2 | 149 | 7 | BISU 1 | 13 | 81 |
| | | 150 | 9 | | | |
| 3105 | DAXX | 151 | 8 | BISU 1 | 15 | 83 |
| | | 152 | 10 | | | |
| 3107 | DDAH2 | 153 | 9 | BISU 1 | 17 | 85 |
| | | 154 | 11 | | | |
| 3110 | DDR1 | 155 | 10 | BISU 2 | 20 | 88 |
| | | 156 | 12 | | | |
| 3113 | DOM3-Z | 157 | 11 | BISU 2 | 22 | 90 |
| | | 158 | 13 | | | |
| 3127 | G6d | 159 | 12 | BISU 2 | 24 | 92 |
| | | 160 | 14 | | | |
| 3129 | G7a | 161 | 13 | BISU 2 | 26 | 94 |
| | | 162 | 15 | | | |
| 3145 | HLA-A | 163 | 14 | BISU 2 | 28 | 96 |
| | | 164 | 16 | | | |
| 3152 | HLA-DMA | 165 | 15 | BISU 1 | 29 | 97 |
| | | 166 | 17 | | | |
| 3170 | HLA-DRB3 | 167 | 16 | BISU 2 | 32 | 100 |
| | | 168 | 18 | | | |
| 3192 | MICB | 169 | 17 | BISU 2 | 34 | 102 |
| | | 170 | 19 | | | |
| 3200 | NG22 | 171 | 18 | BISU 1 | 35 | 103 |
| | | 172 | 20 | | | |
| 3208 | PBX2 | 173 | 19 | BISU 1 | 37 | 105 |
| | | 174 | 21 | | | |
| 3239 | TAPBP | 175 | 20 | BISU 1 | 39 | 107 |
| | | 176 | 22 | | | |
| 3243 | TNF | 177 | 21 | BISU 2 | 42 | 110 |
| | | 178 | 23 | | | |
| 3244 | TNXB | 179 | 22 | BISU 2 | 44 | 112 |
| | | 180 | 24 | | | |
| 3252 | ZNF297 | 181 | 23 | BISU 2 | 46 | 114 |
| | | 182 | 25 | | | |
| 3265 | dJ570F3 | 183 | 24 | BISU 2 | 48 | 116 |
| | | 184 | 26 | | | |
| 3291 | BTNL2 | 185 | 25 | BISU 2 | 50 | 118 |
| | | 186 | 27 | | | |
| 3312 | SKIV2L | 187 | 26 | BISU 2 | 52 | 120 |
| | | 188 | 28 | | | |
| 3329 | C2 | 189 | 27 | BISU 1 | 53 | 121 |
| | | 190 | 29 | | | |
| 3330 | ABCB2 | 191 | 28 | BISU 1 | 55 | 123 |
| | | 192 | 30 | | | |
| 3347 | dJ570F3 | 193 | 29 | BISU 2 | 58 | 126 |
| | | 194 | 31 | | | |
| 3348 | DDX16 | 195 | 30 | BISU 2 | 60 | 128 |
| | | 196 | 32 | | | |
| 3364 | TNXB | 197 | 31 | BISU 2 | 62 | 130 |
| | | 198 | 33 | | | |
| 3374 | RAB2L | 199 | 32 | BISU 2 | 64 | 132 |
| | | 200 | 34 | | | |
| 3377 | BAT2 | 201 | 33 | BISU 2 | 66 | 134 |
| | | 202 | 35 | | | |
| 3382 | DDX16 | 203 | 34 | BISU 1 | 67 | 135 |
| | | 204 | 36 | | | |

[0275] The listing of the primer molecules of Table 1, however, is not to be understood as limiting the scope of the method to the use of only those primer molecules. Rather, the listing is meant to illustrate and enable the example given. It will be obvious to one skilled in the relevant art that primer molecules that will amplify, preferably by means of a PCR, the other bisulfite pretreated strand (for example BISU 2) also provide the means to analyze the methylation levels of exactly the same CpGs within these genomic regions. Therefore, it is understood, that the use of amplification of such other strands is also enabled, even though the explicit sequences are not listed in Table 1.

[0276] Further embodiments of the present invention comprise primers and primer sets used to amplify ROI regions, based upon disclosure of the genomic region of the MHC, specification of the regions of interest (ROI) by disclosing BISU 1 (or BISU 2 respectively) of those ROIs, and otherwise disclosing methods to optimally design those primers to achieve an unbiased amplification of the sections containing the listed MVPs.

[0277] An especially preferred selection of primer pairs is disclosed in Table 1.

[0278] The obtained PCR amplificates were subjected to high-throughput bisulfite DNA sequencing and methylation analysis, as described above.

[0279] In this example, 253 genomic regions were amplified and sequenced, both in forward and reverse direction, in 32 different samples resulting in a minimum of 16,192 sequencing reads. Analyzing the trace files of those reads with ESME (described herein above), the methylation levels at all 3,302 CpG positions in the 6 tissues (prostate, muscle, lung, liver, breast and brain) were determined, and candidate methylation variable positions (MVPs) were identified.

[0280] Each amplificate was bisulfite sequenced once from both ends using the original PCR primers, ABI Prism™ BigDye terminator chemistry and 3700/3730 capillary sequencers to ensure maximum accuracy. The individual reads were base-called using the PHRED algorithm which provides quality values for each base. Bisulfite sequences that passed the internal quality test were analyzed with the ESME software. Raw sequencing data were calibrated and normalized.

[0281] An example of an MVP identified in the present MHC study by bisulfite sequencing is shown in FIG. 36. Two different healthy tissues were analyzed. The left sequence trace shows the analysis of DNA isolated from healthy lung tissue, wherein the cytosine of interest is methylated. The right trace shows the analysis of DNA isolated from healthy brain tissue, wherein the corresponding cytosine position is unmethylated. Bisulfite sequencing is based on the conversion of all non-methylated cytosines to uracil, by treatment of genomic DNA with bisulfite. In the sequence trace, non-methylated cytosine appears therefore as T, while methylated C appears as C (see FIG. 36).

[0282] Levels of methylation identified at particular CpG sites are given as percentages in Tables 3-36. For an improved visualization, however, the data were also entered into a matrix display showing, on a gray scale, methylation levels for each analyzed position in the roughly 25 samples according to the 6 different sample types represented (see FIGS. 1-34). The shade of gray directly correlated to the level of methylation, as can be seen in FIG. 35. A black box represents a methylation percentage of 100%, indicating that, at this position, every single DNA molecule within the sample analyzed was methylated. A very light gray box, however, indicates that all DNA molecules were unmethylated at this position. A white box indicates that no value was obtained. In the Tables 3-36, these positions are labeled as “NA” (not applicable).

[0283] In Tables 3-36, the related CpG positions within the ROI sequence are given. As all four sequences of the bisulfite versions (i.e., all four bisulfite sequences, corresponding to the fully up-methylated and the fully down-methylated variants) of each respective ROI are disclosed in the sequence listing, all CpG locations, including the MVP locations, within the sequences can easily be identified. The question as to whether or not a particular ROI is a useful marker or not can be answered by examination of the methylation levels disclosed numerically in Tables 3-36, as represented by different shades of gray in the corresponding Figures. A low-level of methylation at a specific data point, determined by the tissue sample and the CpG position analyzed, is represented as a square in light gray color, whereas a high-level of methylation is indicated in dark gray. FIG. 35 shows how the different levels of methylation correlate with the scale of gray in FIGS. 1-34. The data points are represented as groups of the samples from the same tissue, thereby facilitating the decision as to which sections of the ROI, comprising which CpG positions, can be utilized as effective markers for distinguishing the specific tissue or group of tissues from others. If, in the FIGS. 1-34, the gray scaled pattern is evidently lighter or darker at an area for only one or even two kinds of tissues when compared to the remaining tissues, then this ROI is a methylation marker for said tissue, and in particular embodiments, can be used as a tissue marker in suitable assays, as described in EXAMPLES 2-6, herein below. Occasionally, only some specific CpG positions out of the about 10-15 positions analyzed show different methylation levels, depending on the tissue type the analyzed DNA was derived from.

[0284] P-values were calculated that are indicative of the differentiating power of each single CpG position, and are also given in the Tables 3-36. This value, while indicative of the ‘marking ability’ of each CpG position, however, is only meant to illustrate the statistical relevance of this data set. Preferably, the actual quality of a methylation marker is ultimately determined by the accumulation of a plurality of differentiating CpG positions within a section of about 200-500 bp. Especially preferred are those sections that comprise more than two differentially-methylated CpG positions, within a total of about 5 CpG positions located next to each other (within a total of about 5 proximate CpG positions).

[0285] Two different P-values are given for each CpG position in cases where a marker ROI is comprised of two different sections that could each, independently, be used to differentiate between different tissues or tissue groups, as for example ROI 3105.

[0286] A selection of the ROIs identified by visual examination of the methylation pattern analysis, and hence a first indication of their usefulness, is given in Table 2.

[0287] For example, FIG. 8 displays the levels of methylation of CpGs located in the amplificate 3105 of ROI 3105. The numbers at the left hand side indicate the position of the CpGs analyzed within said amplificate. 3105_{—}45, for example, states that the cytosine of said CpG is the 45th nucleotide from the 5′-end of amplificate 3105. The positions of said MVPs within the amplificate (for example, the MVP positions within the ROI 3105 amplificate as given in the CpG identifier column of Table 10) are disclosed in the CpG identifier in the Tables 3-36 and in FIGS. 1-34. The position of the amplificate 3105 within the ROI 3105 is determined by the binding position of its amplification primers. The primer pair given for ROI 3105 (primer SEQ ID NO:151 and primer SEQ ID NO:152) are priming either at ROI SEQ ID NO:15 or ROI SEQ ID NO:83 as given in Table 1. The primer that hybridizes to the first copy of the amplified strand, and that therefore is identical to the bisulfite sequence itself, usually is referred to as the forward primer, because it marks the beginning of the amplificate sequence within the ROI. The position of the first nucleotide of this primer is the start of the amplificate within the ROI, and is also given in Table 2. Therefore, the position of the MVP within the ROI (which is disclosed with a SEQ ID NO) can easily and accurately be identified by simply adding these two numbers.

[0288] Additionally, the explicit positions of each CpG and MVP within the ROI are given in Tables 3-36.

TABLE 2

| | ROI SEQ | | | | | | | |
|---|---|---|---|---|---|---|---|---|
| | IDs | | ROI SEQ IDs | | FIG. | Start of | | from other |
| ROI Identifier | up | | down | | Number | amplificate | identifies | types |
| 3083 | 1 | 2 | 69 | 70 | 1 | 414 | liver | all |
| 3084 | 3 | 4 | 71 | 72 | 2 | 976 | brain | all |
| 3084 | 3 | 4 | 71 | 72 | 2 | 976 | breast | all |
| 3091 | 5 | 6 | 73 | 74 | 3 | 1667 | breast | all |
| 3093 | 7 | 8 | 75 | 76 | 4 | 1098 | liver | all |
| 3094 | 9 | 10 | 77 | 78 | 5 | 470 | liver | all |
| 3103 | 11 | 12 | 79 | 80 | 6 | 1711 | liver | all |
| 3104 | 13 | 14 | 81 | 82 | 7 | 1743 | liver | all |
| 3105-1 | 15 | 16 | 83 | 84 | 8 | 255 | breast | all |
| 3105-2 | 15 | 16 | 83 | 84 | 8 | 255 | muscle | all, but |
| | | | | | | | | breast |
| 3107 | 17 | 18 | 85 | 86 | 9 | 278 | brain | breast, lung |
| 3107 | 17 | 18 | 85 | 86 | 9 | 278 | breast, lung | all |
| 3110 | 19 | 20 | 87 | 88 | 10 | 1901 | brain, breast, | liver, lung, |
| | | | | | | | muscle | prostate |
| 3113 | 21 | 22 | 89 | 90 | 11 | 19 | breast, liver, | brain, lung |
| | | | | | | | muscle | |
| 3127 | 23 | 24 | 91 | 92 | 12 | 1731 | breast | all |
| 3129 | 25 | 26 | 93 | 94 | 13 | 1900 | liver | all |
| 3145 | 27 | 28 | 95 | 96 | 14 | 618 | liver, muscle | breast, |
| | | | | | | | | brain |
| 3152 | 29 | 30 | 97 | 98 | 15 | 1795 | brain, breast, | lung, |
| | | | | | | | muscle | prostate |
| 3170 | 31 | 32 | 99 | 100 | 16 | 1688 | lung | all |
| 3192 | 33 | 34 | 101 | 102 | 17 | 346 | lung | all, but |
| | | | | | | | | brain |
| 3200 | 35 | 36 | 103 | 104 | 18 | 1861 | liver | all |
| 3208 | 37 | 38 | 105 | 106 | 19 | 696 | liver | all |
| 3239 | 39 | 40 | 107 | 108 | 20 | 585 | breast, | brain, lung, |
| | | | | | | | prostate | liver |
| 3243 | 41 | 42 | 109 | 110 | 21 | 1519 | breast | all |
| 3244 | 43 | 44 | 111 | 112 | 22 | 101 | muscle | all |
| 3252 | 45 | 46 | 113 | 114 | 23 | 701 | breast, | all |
| | | | | | | | muscle | |
| 3265 | 47 | 48 | 115 | 116 | 24 | 654 | muscle | all |
| 3291 | 49 | 50 | 117 | 118 | 25 | 205 | brain | all |
| 3312 | 51 | 52 | 119 | 120 | 26 | 1427 | liver | all |
| 3329 | 53 | 54 | 121 | 122 | 27 | 1099 | liver | all |
| 3330 | 55 | 56 | 123 | 124 | 28 | 1988 | lung | muscle |
| 3347 | 57 | 58 | 125 | 126 | 29 | 1875 | muscle, | all |
| | | | | | | | brain | |
| 3348 | 59 | 60 | 127 | 128 | 30 | 1556 | liver | all |
| 3364 | 61 | 62 | 129 | 130 | 31 | 1888 | brain | all |
| 3374 | 63 | 64 | 131 | 132 | 32 | 941 | breast, | all |
| | | | | | | | muscle | |
| 3377 | 65 | 66 | 133 | 134 | 33 | 2006 | breast | all |
| 3382 | 67 | 68 | 135 | 136 | 34 | 1191 | brain, breast | all |

[0289] The utilities of said MVPs (within the according ROIs) for distinguishing between or among which tissue types can be determined from examination of FIGS. 1-34, and from the Tables 3-36 (below).

[0290] The ROIs can now be scored, for example, according to the number of CpG positions that seem to discriminate between specific tissues. The more discriminating MVPs there are in one ROI the better. Another way to score the ROIs is to more highly score those markers comprising adjacent or proximate MVPs. A third way to identify those ROIs that would be most useful for the identification, differentiation or for distinguishing between cell types or tissue types is to use the data given in Tables 3-36 to calculate the P-values for those differing methylation levels.

[0291] Each particularly useful MVP and its particular utility is given in the Tables 37-70 (below). These MVPs, and nucleotide sequences comprising a contiguous sequence of at least 16 nucleotides in length (or at least 18, 20, 22, 23, 25, 30 or 35 nucleotides in length) comprising the three bases 5′ to the MVP and the three bases 3′ to the MVP are a preferred embodiment of the present invention. Especially preferred are those oligomers comprising a MVP which qualifies as a “good marker position” as indicated in Tables 37-70, (P-value smaller than 0.05). However, the P-values given here have mainly been calculated for differentiation of one tissue against the group of all other tissue samples, for example the P-values for ROI 3091 were calculated by comparing the methylation levels of the breast samples against those of all other samples, and the P-values might have been better for comparing these breast samples with liver samples only. That is why this selection is not understood as limiting the scope of the present invention to only those MVPs that have P-values as given that are smaller than 0.05.

[0292] Additionally, the use of those sequences comprising these MVPs to identify the tissue that shows a distinguished methylation pattern is a preferred embodiment of this invention. Particularly preferred are those nucleic acid and oligomer sequences comprising a contiguous sequence of at least 16 nucleotides in length (or at least 18, 20, 22, 23, 25, 30 or 35 nucleotides in length) comprising comprising said MVPs, and particularly comprising the three bases 5′ to the MVP and the three bases 3′ to the MVP.

[0293] Tables 3-36, and Tables 37-70 follow next:

TABLE 3
(3083):

| | MVP | | | | | | | | | | | | |
|---|---|---|---|---|---|---|---|---|---|---|---|---|---|
| CpG | Position | | | | | | | | | | | | |
| identifier | in ROI | Prostate | Prostate | Prostate | Prostate | Prostate | Prostate | Prostate | Muscle | Muscle | Muscle | Muscle | Muscle |
| 3083: 28 | 442 | 0.91 | 1 | 0.49 | 1 | 0.5 | 1 | NA | 1 | 0.9 | 1 | 0.41 | 1 |
| 3083: 31 | 445 | 1 | 1 | 1 | 1 | 0.55 | 1 | NA | 1 | 1 | 1 | 0.5 | 1 |
| 3083: 40 | 454 | 1 | 1 | NA | NA | 1 | NA | NA | 1 | 1 | 1 | 0.78 | 1 |
| 3083: 55 | 469 | 1 | 1 | 1 | 1 | 1 | 0.76 | NA | 1 | 0.81 | 0.58 | 0.83 | 0.71 |
| 3083: 61 | 475 | 1 | 1 | 0.45 | NA | 1 | 1 | NA | 1 | NA | 0.73 | 1 | NA |
| 3083: 95 | 509 | 0.65 | 1 | NA | 0 | 1 | 0.75 | NA | 0.61 | 1 | 0.88 | 1 | 1 |
| 3083: 122 | 536 | 1 | 1 | 1 | 1 | 0.87 | 1 | NA | 1 | 1 | 1 | 1 | 1 |
| 3083: 143 | 557 | 1 | 0.5 | NA | 0.5 | 1 | 0.5 | NA | 1 | 1 | 1 | 1 | 0.5 |
| 3083: 161 | 575 | 1 | 1 | 0.75 | NA | 0.96 | 1 | NA | 0.87 | NA | 0.85 | 0.93 | 1 |
| 3083: 202 | 616 | 1 | 1 | 1 | 1 | 1 | 1 | 1 | 1 | 1 | 1 | 1 | 1 |
| 3083: 216 | 630 | 1 | 0.83 | 0.87 | 0.83 | 1 | 0.8 | 1 | 0.91 | 0.84 | 0.94 | 1 | 0.87 |
| 3083: 235 | 649 | 0.92 | 1 | 0.51 | 1 | 0.88 | 1 | NA | 1 | 1 | 1 | 0.86 | 1 |
| 3083: 250 | 664 | 0.6 | NA | 0.47 | NA | 0.79 | NA | NA | 0.69 | 0.46 | 0.46 | 0.92 | NA |
| 3083: 262 | 676 | 0.92 | 0.62 | 0.79 | 0.57 | 1 | 0.74 | 0.74 | 0.85 | 0.63 | 0.69 | 0.97 | 0.65 |
| 3083: 265 | 679 | 1 | 0.8 | 0.63 | 0.82 | 1 | 0.82 | 0 | 0.95 | 0.91 | 0.95 | 0.97 | 0.91 |
| 3083: 269 | 683 | 0.8 | 0.61 | 0.61 | 0.6 | 0.69 | 0.55 | 1 | 0.21 | 0.21 | 0.75 | 0.63 | 0.19 |
| 3083: 294 | 708 | 0.86 | 0.72 | 0.21 | 0.59 | 0.93 | 0.17 | NA | 0.79 | 0.5 | 0.74 | 0.75 | 0.49 |
| 3083: 299 | 713 | NA | NA | 0.22 | NA | 1 | NA | NA | 0.44 | NA | NA | 0.9 | NA |

| CpG | MVP | | | | | | | | | | | | |
|---|---|---|---|---|---|---|---|---|---|---|---|---|---|
| identifier | Position in ROI | Lung | Lung | Lung | Lung | Lung | Liver | Liver | Breast | Breast | Breast | Breast | Breast |
| 3083: 28 | 442 | 1 | 0.5 | 1 | 1 | 1 | 0.29 | 0.15 | 0.5 | 0.5 | 0.82 | NA | 0.65 |
| 3083: 31 | 445 | 0.5 | 1 | NA | 1 | 0.8 | 0.55 | 0.42 | 0.5 | 0.5 | 1 | NA | 1 |
| 3083: 40 | 454 | 1 | 1 | 1 | 1 | 1 | 0.3 | 0.31 | 1 | 1 | 1 | 1 | 1 |
| 3083: 55 | 469 | 1 | 1 | 0 | 1 | 1 | 0.24 | 0.11 | 1 | 1 | 0.83 | 1 | 0.86 |
| 3083: 61 | 475 | 0.43 | 1 | NA | 1 | 1 | 0.14 | 0.41 | 1 | 1 | 1 | 1 | 1 |
| 3083: 95 | 509 | 0.4 | 0.78 | 0.42 | 0.8 | 0.86 | 0.094 | 0.16 | 1 | 1 | 1 | 0.8 | 0.69 |
| 3083: 122 | 536 | 1 | 1 | 1 | 0.93 | 1 | 0.23 | 0.11 | 0.88 | 0.96 | 1 | 0.93 | 0.75 |
| 3083: 143 | 557 | 1 | 1 | NA | 1 | 1 | 0.66 | 0.14 | 1 | 0.94 | 1 | 1 | 1 |
| 3083: 161 | 575 | 0.83 | 0.97 | NA | 1 | 0.95 | 0.44 | 0.19 | 0.93 | 0.92 | 0.89 | 1 | 1 |
| 3083: 202 | 616 | 1 | 1 | 1 | 1 | 1 | 0.68 | 0.47 | 1 | 1 | 1 | 1 | 1 |
| 3083: 216 | 630 | 0.91 | 1 | NA | 1 | 1 | 0.45 | 0.12 | 1 | 0.97 | 0.99 | 1 | 1 |
| 3083: 235 | 649 | 1 | 0.94 | NA | 0.91 | 0.9 | 0.11 | 0.25 | 0.83 | 0.91 | 0.84 | 0.96 | 0.8 |
| 3083: 250 | 664 | 0.54 | 0.9 | NA | 0.88 | 0.91 | 0.38 | 0.12 | 0.8 | 0.89 | 0.89 | 0.8 | 0.82 |
| 3083: 262 | 676 | 0.89 | 0.98 | 0.42 | 0.97 | 0.99 | 0.38 | 0.27 | 0.96 | 1 | 0.99 | 0.95 | 0.93 |
| 3083: 265 | 679 | 0.96 | 0.98 | NA | 0.98 | 0.98 | 0.21 | 0.21 | 0.96 | 1 | 0.99 | 0.89 | 0.97 |
| 3083: 269 | 683 | 0.38 | 0.82 | 0.64 | 0.87 | 0.76 | 0.079 | 0.052 | 0.76 | 0.65 | 0.81 | 0.71 | 0.58 |
| 3083: 294 | 708 | 0.66 | 0.94 | 0.4 | 0.87 | 0.91 | 0.16 | 0.065 | 0.94 | 0.91 | 0.89 | 0.84 | 0.73 |
| 3083: 299 | 713 | 0.42 | 1 | 0.28 | 0.58 | 0.99 | 0.14 | 0 | 1 | 1 | 0.93 | 0.99 | 0.84 |

| CpG | MVP | | | | | | | |
|---|---|---|---|---|---|---|---|---|
| identifier | Position in ROI | Breast | Brain | Brain | Brain | Brain | Brain | Brain |
| 3083: 28 | 442 | 1 | 1 | 0.39 | 1 | 0.5 | 0.88 | 1 |
| 3083: 31 | 445 | 0.86 | 1 | 0.6 | 1 | 0.5 | 1 | 1 |
| 3083: 40 | 454 | 0.65 | 1 | 0.84 | NA | 1 | 1 | 1 |
| 3083: 55 | 469 | 1 | 1 | 0.9 | 1 | 0.9 | 1 | 1 |
| 3083: 61 | 475 | 1 | 1 | 1 | 0.5 | 1 | 0.8 | 1 |
| 3083: 95 | 509 | 1 | 0.86 | 1 | 1 | 0.9 | 0.92 | 1 |
| 3083: 122 | 536 | 0.89 | 0.98 | 1 | 0.5 | 1 | 0.95 | 1 |
| 3083: 143 | 557 | 1 | 0.92 | 1 | 1 | 0.97 | 0.94 | 0.95 |
| 3083: 161 | 575 | 0.95 | 0.95 | 1 | 1 | 0.93 | 0.93 | 0.93 |
| 3083: 202 | 616 | 1 | 1 | 1 | 1 | 1 | 1 | 1 |
| 3083: 216 | 630 | 0.91 | 1 | 1 | 1 | 1 | 0.9 | 1 |
| 3083: 235 | 649 | 0.77 | 0.97 | 0.98 | 1 | 0.91 | 0.73 | 0.94 |
| 3083: 250 | 664 | 0.71 | 0.96 | 0.89 | 1 | 0.85 | 0.9 | 0.95 |
| 3083: 262 | 676 | 0.96 | 1 | 1 | 1 | 0.98 | 1 | 0.97 |
| 3083: 265 | 679 | 0.91 | 0.97 | 0.99 | 1 | 0.97 | 0.99 | 1 |
| 3083: 269 | 683 | 0.56 | 0.79 | 0.7 | 1 | 0.96 | 0.5 | 0.66 |
| 3083: 294 | 708 | 0.66 | 0.81 | 0.89 | 1 | 0.9 | 0.67 | 0.89 |
| 3083: 299 | 713 | 0.74 | 0.96 | 1 | 0.78 | 0.93 | 1 | 0.96 |

[0294] TABLE 4
(3084):

| | MVP | | | | | | | | | | | | | | |
|---|---|---|---|---|---|---|---|---|---|---|---|---|---|---|---|
| | Position | | | | | | | | | | | | | | |
| CpG identifier | in ROI | Prostate | Prostate | Prostate | Prostate | Prostate | Muscle | Muscle | Muscle | Muscle | Muscle | Lung | Lung | Lung | Lung |
| 3084: 41 | 1017 | 0.89 | 0.9 | 0.91 | 1 | 0.13 | 1 | 0.83 | 0.9 | 0.86 | 0.94 | 0 | 1 | 1 | 1 |
| 3084: 56 | 1032 | 0.92 | 0.72 | 0.95 | 1 | 0.94 | 0.89 | 1 | 0.53 | 0.73 | 0.82 | 0.87 | 1 | 0.83 | 0.71 |
| 3084: 69 | 1045 | 1 | 0.91 | 0.88 | 1 | 0.97 | 0.93 | 1 | 0.96 | 0.91 | 0.89 | 0.88 | 1 | 0.96 | 0.87 |
| 3084: 72 | 1048 | 0.95 | 0.83 | 0.95 | 0.92 | 0.84 | 0.93 | 0.97 | 0.89 | 0.89 | 0.81 | 0.93 | 1 | 0.95 | 0.83 |
| 3084: 77 | 1053 | 1 | 0.7 | 1 | 1 | 1 | 0.83 | 1 | 0.63 | 0.59 | 0.6 | 1 | 1 | 0.79 | 0.77 |
| 3084: 101 | 1077 | 1 | 0.88 | 0.92 | 1 | 0.94 | 0.97 | 0.89 | 0.78 | 0.86 | 0.91 | 0.91 | 0.98 | 0.91 | 0.91 |
| 3084: 201 | 1177 | 0.7 | 0.36 | 1 | 0.88 | 0.97 | 0.62 | 0.72 | 0.79 | 0.79 | 0.8 | 0.79 | 0.89 | 0.84 | 0.91 |
| 3084: 276 | 1252 | 0.36 | 0.38 | 0.43 | 0.53 | 1 | 0.23 | 0.42 | 0.038 | 0.28 | 0.22 | 0.4 | 0.42 | 0.32 | 0.45 |
| 3084: 301 | 1277 | 0.61 | 0.2 | 0.43 | 0.69 | 0.96 | 0.37 | 0.45 | 0.37 | 0.4 | 0.33 | 0.6 | 0.72 | 0.37 | 0.49 |
| 3084: 349 | 1325 | 0.19 | 0.14 | 0.36 | 0.2 | 0.13 | 0.17 | 0.12 | 0.0047 | 0.12 | 0.36 | 0.32 | 0.4 | 0.33 | 0.16 |
| 3084: 364 | 1340 | 0.15 | 0.19 | 0 | 0.38 | 0.085 | 0.18 | 0.21 | 0.13 | 0.26 | 0.32 | 0.41 | 0.64 | 0.24 | 0.23 |

| CpG | | | | | | | | | | | | | | | |
|---|---|---|---|---|---|---|---|---|---|---|---|---|---|---|---|
| identifier | MVP Position in ROI | Liver | Liver | Breast | Breast | Breast | Breast | Breast | Breast | Brain | Brain | Brain | Brain | Brain | Brain |
| 3084: 41 | 1017 | 0.7 | 0.25 | 0.68 | 1 | 0.51 | 1 | 0.29 | 0.87 | 0 | 1 | 0.85 | 1 | 0.83 | 1 |
| 3084: 56 | 1032 | 0.69 | 0.81 | 0.56 | 0.78 | 0.43 | 0.64 | 0.61 | 0.85 | 1 | 0.81 | 0.88 | 0.84 | 0.79 | 1 |
| 3084: 69 | 1045 | 0.84 | 1 | 0.52 | 0.91 | 0.63 | 0.41 | 0.75 | 0.88 | 1 | 0.87 | 0.95 | 0.86 | 0.96 | 0.75 |
| 3084: 72 | 1048 | 0.84 | 0.9 | 0 | 0.93 | 0.62 | 0.95 | 0.81 | 0.8 | 1 | 0.88 | 0.88 | 0.88 | 0.95 | 0.87 |
| 3084: 77 | 1053 | 1 | 1 | 0.67 | 1 | 0.62 | 0.76 | 0.69 | 1 | 1 | 0.78 | 0.87 | 1 | 0.8 | 1 |
| 3084: 101 | 1077 | 1 | 0.93 | 0.5 | 0.87 | 0.8 | 0.74 | 0.88 | 0.87 | 1 | 0.92 | 0.89 | 0.92 | 0.9 | 0.76 |
| 3084: 201 | 1177 | 0.49 | 0.45 | 0.45 | 0.75 | 0.48 | 0.72 | 0.75 | 0.72 | 1 | 0.86 | 0.64 | 0.83 | 0.88 | 0.58 |
| 3084: 276 | 1252 | 0.24 | 0.19 | 0.17 | 0.33 | 0 | 0.27 | 0.35 | 0.43 | 0.71 | 0.64 | 0.72 | 0.46 | 0.53 | 0.82 |
| 3084: 301 | 1277 | 0.81 | 0.57 | 0.22 | 0.4 | 0.66 | 0.38 | 0.55 | 0.47 | 0.95 | 0.8 | 0.85 | 0.79 | 0.83 | 0.78 |
| 3084: 349 | 1325 | 0.097 | 0.045 | 0.094 | 0.11 | 0.15 | 0.25 | 0.4 | 0.29 | 0.93 | 0.64 | 0.8 | 0.41 | 0.69 | 0.55 |
| 3084: 364 | 1340 | 0.09 | 0.17 | 0.19 | 0.19 | 0.42 | 0.38 | 0.21 | 0.22 | 0.9 | 0.71 | 1 | 0.82 | 0.83 | 0.54 |

[0295] TABLE 5
(3091):

| | MVP | | | | | | | | | | | | | |
|---|---|---|---|---|---|---|---|---|---|---|---|---|---|---|
| CpG | Position | | | | | | | | | | | | | |
| identifier | in ROI | Prostate | Prostate | Prostate | Prostate | Muscle | Muscle | Muscle | Muscle | Lung | Lung | Lung | Lung | Liver |
| 3091: 99 | 1766 | 1 | 1 | 0.45 | 1 | 0.84 | 0.88 | 0.78 | 0.81 | 0.85 | 1 | 0.97 | 1 | 1 |
| 3091: 159 | 1826 | 0.63 | 0.89 | 1 | 1 | 0.58 | 0.68 | 0.49 | 0.61 | 0.66 | 0.5 | 0.71 | 1 | 0.89 |
| 3091: 198 | 1865 | 1 | 1 | 1 | 1 | 1 | 1 | 1 | 1 | 0.86 | 1 | 1 | 1 | 1 |
| 3091: 205 | 1872 | 1 | 0.98 | 1 | 1 | 1 | 1 | 0.93 | 1 | 1 | 1 | 1 | 0.89 | 1 |
| 3091: 217 | 1884 | 1 | 1 | 1 | 0.95 | 1 | 1 | 1 | 1 | 1 | 1 | 1 | 1 | 1 |
| 3091: 241 | 1908 | 1 | 0.96 | 1 | 1 | 0.98 | 0.82 | 1 | 1 | 1 | 1 | 0.91 | 1 | 1 |
| 3091: 247 | 1914 | 1 | 0.92 | 1 | 1 | 1 | 0.83 | 1 | 1 | 0.78 | 1 | 1 | 1 | 1 |
| 3091: 257 | 1924 | 0.72 | 0.95 | 1 | 0.98 | 0.72 | 0.95 | 1 | 0.9 | 0.67 | 1 | 0.86 | 1 | 0.8 |
| 3091: 272 | 1939 | 1 | 1 | 1 | 1 | 0.97 | 1 | 1 | 1 | 0.95 | 1 | 1 | 1 | 1 |
| 3091: 281 | 1948 | 0.89 | 0.96 | 1 | 0.92 | 1 | 0.83 | 1 | 0.91 | 1 | 0.89 | 1 | 1 | 1 |
| 3091: 286 | 1953 | 1 | 0.94 | 1 | 1 | 1 | 0.85 | 1 | 0.97 | 0.67 | 1 | 1 | 1 | 1 |
| 3091: 303 | 1970 | 1 | 1 | 1 | 0.94 | 0.81 | 0.96 | 1 | 0.77 | 0.67 | 1 | 1 | 1 | 1 |
| 3091: 320 | 1987 | 1 | 1 | 1 | 0.18 | 1 | 0.72 | 1 | 0.88 | 0.98 | 1 | 1 | 0.87 | 0.97 |
| 3091: 334 | 2001 | 0.96 | 0.85 | 1 | 0.94 | 0.87 | 0.57 | 0.94 | 1 | 0.77 | 1 | 0.98 | 1 | 1 |
| 3091: 337 | 2004 | 1 | 0.82 | 0.92 | 1 | 0.68 | 0.81 | 0.56 | 0.56 | 0.67 | 0.7 | 0.74 | 0.91 | 1 |
| 3091: 370 | 2037 | 0.89 | 0.81 | 0.77 | 0.82 | 0.91 | 1 | 0.87 | 0.89 | 0.64 | 0.77 | 1 | 0.78 | 0.86 |
| 3091: 379 | 2046 | 0.95 | 0.82 | 1 | 1 | 0.97 | 0.72 | 1 | 0.88 | 0.73 | 1 | 0.93 | 1 | 0.93 |
| 3091: 391 | 2058 | 1 | 1 | 0.93 | 1 | 0.9 | 0.77 | 1 | 0.92 | 0.46 | 1 | 0.93 | 0.98 | 0.84 |
| 3091: 449 | 2116 | 0.45 | 0.0081 | 0.37 | 0.5 | 0.69 | 0.98 | 0.56 | 0.47 | 0.54 | 0.22 | 0.62 | 0.36 | 0.96 |

| CpG | MVP | | | | | | | | | | | | | |
|---|---|---|---|---|---|---|---|---|---|---|---|---|---|---|
| identifier | Position in ROI | Liver | Breast | Breast | Breast | Breast | Breast | Breast | Brain | Brain | Brain | Brain | Brain | Brain |
| 3091: 99 | 1766 | 1 | 0.88 | 0.66 | 0.88 | 0.92 | 0.98 | 0.93 | 0.93 | 1 | 1 | 1 | 0.87 | 0.94 |
| 3091: 159 | 1826 | 1 | 0.55 | 0.94 | 0.6 | 0.23 | 0.51 | 0.69 | 0.77 | 1 | 0.41 | 1 | 0.63 | 0.93 |
| 3091: 198 | 1865 | 1 | 1 | 1 | 1 | 0.75 | 1 | 1 | 1 | 1 | 1 | 1 | 0.97 | 1 |
| 3091: 205 | 1872 | 1 | 0.97 | 0.78 | 1 | 0.76 | 1 | 1 | 1 | 1 | 0.92 | 1 | 1 | 1 |
| 3091: 217 | 1884 | 1 | 1 | 1 | 1 | 0.74 | 1 | 1 | 1 | 1 | 1 | 1 | 1 | 1 |
| 3091: 241 | 1908 | 1 | 0.91 | 0.92 | 0.97 | 0.83 | 1 | 1 | 1 | 1 | 1 | 0.96 | 0.83 | 1 |
| 3091: 247 | 1914 | 1 | 0.97 | 0.95 | 0.98 | 1 | 1 | 1 | 1 | 1 | 1 | 0.98 | 1 | 1 |
| 3091: 257 | 1924 | 0.55 | 0.73 | 0.55 | 0.57 | 0.81 | 0.91 | 0.73 | 0.97 | 1 | 0.76 | 0.94 | 0.83 | 0.96 |
| 3091: 272 | 1939 | 1 | 1 | 0.84 | 1 | 0.65 | 1 | 0.79 | 1 | 0.93 | 0.87 | 0.87 | 0.83 | 1 |
| 3091: 281 | 1948 | 0.97 | 0.76 | 0.82 | 0.86 | 0.75 | 1 | 1 | 1 | 1 | 0.89 | 1 | 0.86 | 0.92 |
| 3091: 286 | 1953 | 1 | 1 | 0.82 | 0.98 | 1 | 1 | 1 | 1 | 1 | 1 | 1 | 1 | 1 |
| 3091: 303 | 1970 | 1 | 0.86 | 0.83 | 0.83 | 0.87 | 0.73 | 0.59 | 1 | 1 | 1 | 0.88 | 0.97 | 1 |
| 3091: 320 | 1987 | 1 | 0.94 | 0.85 | 0.71 | 0.68 | 0.65 | 0.66 | 1 | 1 | 1 | 1 | 1 | 1 |
| 3091: 334 | 2001 | 1 | 0.94 | 0.9 | 0.78 | 1 | 0.94 | 1 | 1 | 1 | 1 | 0.94 | 0.97 | 0.91 |
| 3091: 337 | 2004 | 1 | 0.57 | 0.67 | 0.3 | 0.79 | 0.6 | 0.7 | 0.92 | 1 | 1 | 1 | 0.9 | 0.93 |
| 3091: 370 | 2037 | 0.84 | 0.72 | 0.63 | 0.59 | 1 | 0.85 | 0.71 | 0.9 | 0.38 | 0.75 | 0.91 | 0.71 | 0.87 |
| 3091: 379 | 2046 | 1 | 0.85 | 0.65 | 0.61 | 0.95 | 0.91 | 0.82 | 1 | 1 | 0.88 | 1 | 0.73 | 1 |
| 3091: 391 | 2058 | 1 | 0.8 | 0.56 | 0.65 | 1 | 0.79 | 0.79 | 1 | 0.96 | 0.6 | 0.98 | 0.84 | 1 |
| 3091: 449 | 2116 | 0.87 | 0.42 | 0.64 | 0.64 | 0.76 | 0.55 | 0.56 | 0.8 | 0.79 | 1 | 0.52 | 0.52 | 0.91 |

[0296] TABLE 6
(3093):

| CpG | MVP | | | | | | | | | | | | |
|---|---|---|---|---|---|---|---|---|---|---|---|---|---|
| identifier | Position in ROI | Prostate | Prostate | Muscle | Muscle | Muscle | Muscle | Lung | Lung | Lung | Liver | Liver | Breast |
| 3093: 24 | 1122 | NA | 0.66 | NA | 0 | 0.66 | 1 | 0.67 | 0.14 | 0.37 | 0.53 | 0 | 1 |
| 3093: 31 | 1129 | NA | NA | NA | 0.6 | 1 | 1 | NA | 1 | 0.32 | 0.78 | 0.5 | NA |
| 3093: 39 | 1137 | NA | 0.59 | 0.5 | NA | 0.76 | 1 | 0.9 | NA | 1 | 1 | 0.18 | 1 |
| 3093: 99 | 1197 | 1 | 1 | 0.78 | 0.77 | 0.97 | 1 | 1 | 1 | 1 | 0.82 | 0.8 | NA |
| 3093: 104 | 1202 | NA | 1 | NA | 0.92 | 1 | 1 | 0.96 | NA | 1 | 1 | 1 | NA |
| 3093: 182 | 1280 | 1 | 1 | 0.35 | 0.63 | 0 | NA | 1 | 1 | NA | 0.17 | 0 | 0.41 |
| 3093: 193 | 1291 | 1 | 0.95 | 1 | 0.62 | 0.62 | NA | 0.93 | 1 | 0.41 | 0.4 | 0.44 | 0.85 |
| 3093: 217 | 1315 | 1 | 1 | NA | 1 | 1 | 1 | 0.92 | 1 | 1 | NA | 0 | 1 |
| 3093: 232 | 1330 | 0.89 | 0.9 | 0.34 | 0.93 | 0.64 | NA | 1 | 0.96 | 0.58 | 0.69 | 0.62 | 0.88 |
| 3093: 240 | 1338 | 1 | 0.65 | 0.61 | 0.93 | 1 | NA | 1 | 0.76 | NA | 0.84 | 0.63 | 0.87 |
| 3093: 247 | 1345 | 0.77 | 0.5 | 0.51 | 0.63 | 0.34 | 0.78 | 0.34 | 0.91 | 0.71 | 0.38 | 0.32 | 0.7 |
| 3093: 256 | 1354 | 0.39 | 0.6 | 0.19 | 0.15 | 0.8 | NA | 0 | 0.6 | NA | 0.15 | 0.64 | 0.33 |
| 3093: 258 | 1356 | 1 | 1 | 0.64 | 0.98 | NA | 1 | NA | 1 | 1 | 0.76 | 0.74 | 0.95 |
| 3093: 269 | 1367 | 1 | 0.75 | 0.41 | 0.74 | 1 | 0 | NA | 1 | 0.36 | 1 | 0.57 | 1 |
| 3093: 277 | 1375 | 0.84 | 0.91 | 0.17 | 0.93 | 0.83 | 0.75 | NA | 1 | 0.91 | 0.43 | 0.27 | 0.7 |
| 3093: 319 | 1417 | 1 | 1 | 0.56 | 0.98 | 1 | 1 | NA | 1 | 1 | 0.89 | 0.73 | 1 |
| 3093: 347 | 1445 | 0.95 | 0.96 | 0.62 | 0.88 | 1 | 1 | NA | 1 | 0.94 | 0.76 | 0.53 | 0.45 |
| 3093: 358 | 1456 | 0.76 | 0.45 | 0 | 0 | 0.31 | 0.43 | NA | 0.12 | 0.54 | 0.18 | 0 | 0.32 |
| 3093: 395 | 1493 | 1 | 1 | 0.6 | 0.81 | 1 | 1 | NA | 1 | 1 | 0 | 1 | 1 |
| 3093: 398 | 1496 | 1 | 1 | 0.65 | 0.94 | 1 | 1 | NA | 1 | 1 | 1 | 1 | 1 |
| 3093: 415 | 1513 | 1 | 1 | 0.73 | 1 | 1 | 1 | NA | 1 | 1 | 1 | 1 | 1 |
| 3093: 433 | 1531 | 1 | 1 | 1 | 1 | 1 | 1 | NA | 1 | 1 | 1 | 1 | 1 |
| 3093: 440 | 1538 | 1 | 0.86 | 1 | NA | 1 | 1 | NA | 1 | 1 | 1 | 0.89 | NA |

| | MVP | | | | | | | | | | | |
|---|---|---|---|---|---|---|---|---|---|---|---|---|
| CpG identifier | Position in ROI | Breast | Breast | Breast | Breast | Breast | Brain | Brain | Brain | Brain | Brain | Brain |
| 3093: 24 | 1122 | 1 | 0.61 | 1 | 0.67 | 0.39 | 1 | 0.44 | 0.54 | 0.94 | 1 | 1 |
| 3093: 31 | 1129 | 1 | 0.79 | NA | 0.77 | 0.35 | NA | 0.72 | 1 | 0 | 1 | 0.63 |
| 3093: 39 | 1137 | 0.72 | 0.56 | 1 | 0.81 | 0.97 | 1 | 0.75 | 1 | 0 | 1 | 1 |
| 3093: 99 | 1197 | 0.76 | 0.85 | 0.67 | 0.5 | 0.89 | 1 | 0.89 | 1 | 0 | 1 | 0.86 |
| 3093: 104 | 1202 | NA | 1 | 1 | 0.5 | 1 | 1 | 1 | 1 | 1 | 1 | 0.89 |
| 3093: 182 | 1280 | NA | 0.5 | 0.56 | 0.29 | 1 | 1 | 0.39 | 0.96 | NA | 0.5 | 0.89 |
| 3093: 193 | 1291 | 0.55 | 0.62 | 0.66 | 0.7 | 0.91 | 0.66 | 0.49 | 1 | NA | 0.85 | 0.94 |
| 3093: 217 | 1315 | 1 | 0.95 | 1 | 1 | 1 | 1 | 1 | 1 | 0.23 | 1 | 0.8 |
| 3093: 232 | 1330 | 0.85 | 0.66 | 0.77 | 0.87 | 0.95 | NA | 0.85 | 1 | NA | NA | 0.92 |
| 3093: 240 | 1338 | 1 | 0.57 | 1 | 0.88 | 0.97 | 1 | 0.85 | 0.86 | NA | 1 | 0.96 |
| 3093: 247 | 1345 | 0.75 | 0.44 | 0.73 | 0.77 | 0.94 | 0.64 | 0.39 | 1 | NA | 0.62 | 1 |
| 3093: 256 | 1354 | 1 | 0.39 | 0.46 | 0.66 | 0.84 | NA | 0.8 | 0.89 | NA | 0.65 | 0.76 |
| 3093: 258 | 1356 | NA | 1 | 1 | 1 | 1 | 1 | 0.94 | 1 | NA | NA | 1 |
| 3093: 269 | 1367 | 1 | NA | 1 | 1 | 0.92 | 1 | 0.87 | 0.78 | NA | 1 | 0.89 |
| 3093: 277 | 1375 | 0.77 | 0.71 | 0.85 | 0.86 | 1 | 1 | 0.9 | 1 | NA | 0.89 | 0.98 |
| 3093: 319 | 1417 | 1 | 1 | 1 | 1 | 0.92 | 1 | 0.97 | 0.99 | NA | 1 | 0.98 |
| 3093: 347 | 1445 | 0.96 | 0.94 | 1 | 1 | 0.82 | 0.95 | 1 | 1 | NA | 1 | 0.87 |
| 3093: 358 | 1456 | 0.24 | 0.24 | 0.26 | 0.82 | 0.42 | 0.35 | 0.57 | 1 | NA | 0.48 | 1 |
| 3093: 395 | 1493 | 0.94 | 1 | 0.98 | 0.5 | 0.9 | 1 | 0.93 | 0.11 | NA | 1 | 1 |
| 3093: 398 | 1496 | 1 | 1 | 1 | 1 | 1 | NA | 0.93 | 0.54 | NA | 1 | 1 |
| 3093: 415 | 1513 | 1 | 1 | 0.96 | 1 | 1 | 1 | 1 | 1 | NA | 1 | 0.97 |
| 3093: 433 | 1531 | 0.88 | 1 | 1 | 1 | 1 | 1 | 1 | 1 | NA | 1 | 1 |
| 3093: 440 | 1538 | 1 | 0.96 | 0.86 | 1 | 1 | NA | 1 | 1 | NA | 0.9 | 1 |

[0297] TABLE 7
(3094):

| | MVP | | | | | | | | | | | | |
|---|---|---|---|---|---|---|---|---|---|---|---|---|---|
| CpG | Position in | | | | | | | | | | | | |
| identifier | ROI | Prostate | Prostate | Prostate | Prostate | Prostate | Prostate | Prostate | Prostate | Muscle | Muscle | Muscle | Muscle |
| 3094: 79 | 549 | 0.85 | 1 | 0.91 | 1 | 1 | 1 | 1 | 1 | 0.98 | 1 | 1 | 0.9 |
| 3094: 103 | 573 | 0.93 | 1 | 1 | 1 | 0.62 | 1 | 0.75 | 1 | 1 | 1 | 1 | 1 |
| 3094: 118 | 588 | 0.4 | 0.79 | 0.85 | 0.97 | 0.65 | 1 | 0.44 | 1 | 0.95 | 0.91 | 0.82 | 1 |
| 3094: 148 | 618 | 0.18 | 1 | 0.99 | 1 | 1 | 0.99 | 1 | 1 | 1 | 0.66 | 1 | 1 |
| 3094: 151 | 621 | 0.63 | 1 | 1 | 1 | 1 | 1 | 1 | 1 | 1 | 0.91 | 1 | 1 |
| 3094: 155 | 625 | 0.48 | NA | 0.62 | 0.57 | NA | 0.48 | 0.76 | 0.9 | 0.61 | 0.66 | 0.72 | 0.83 |
| 3094: 162 | 632 | 1 | 0.63 | 0.66 | 0.9 | 0.23 | 0.89 | 1 | 0.88 | 0.7 | 0.41 | 0.65 | 0.58 |
| 3094: 169 | 639 | 0.72 | 1 | 1 | 1 | 1 | 1 | 0.54 | 1 | 1 | 0.94 | 1 | 1 |
| 3094: 195 | 665 | 0.15 | 0.87 | 0.89 | 0.95 | 0.66 | 0.98 | 0.52 | 0.79 | 0.83 | 0.93 | 0.71 | 0.92 |
| 3094: 342 | 812 | 0.51 | 0.33 | 0.7 | 1 | 0.96 | 0.95 | 1 | 1 | 0.86 | 1 | 0.82 | 0.43 |
| 3094: 393 | 863 | 1 | 1 | 1 | 0.82 | NA | 0.94 | 1 | 1 | 0.82 | 0.78 | 0.72 | 0.72 |

| | MVP | | | | | | | | | | | | | | |
|---|---|---|---|---|---|---|---|---|---|---|---|---|---|---|---|
| CpG | Position | | | | | | | | | | | | | | |
| identifier | in ROI | Muscle | Lung | Lung | Lung | Lung | Lung | Liver | Liver | Breast | Breast | Breast | Breast | Breast | Breast |
| 3094: 79 | 549 | 0.93 | 0.96 | 1 | 1 | 0.9 | 1 | 0.4 | 0.78 | 0.93 | 0.92 | 1 | 1 | 1 | 1 |
| 3094: 103 | 573 | 1 | 1 | 1 | 1 | 1 | 0.88 | 1 | 0.59 | 1 | 1 | 1 | 1 | 1 | 1 |
| 3094: 118 | 588 | 0.85 | 0.89 | 0.94 | 0.81 | 0.91 | 0.94 | 1 | 0.23 | 0.94 | 0.87 | 1 | 0.7 | 0.83 | 0.84 |
| 3094: 148 | 618 | 0.97 | 0.98 | 1 | 1 | 1 | 0.98 | 0.79 | 0.56 | 1 | 1 | 1 | 1 | 0.96 | 1 |
| 3094: 151 | 621 | 1 | 1 | 1 | 1 | 1 | 1 | 0.67 | 0.51 | 1 | 1 | 1 | 1 | 1 | 1 |
| 3094: 155 | 625 | 0.66 | 0.6 | 1 | NA | 0.61 | 1 | 0.88 | NA | 0.77 | NA | NA | NA | 0.66 | 0.54 |
| 3094: 162 | 632 | 0.57 | 0.77 | 0.87 | 0.67 | 0.83 | 0.89 | 0.19 | 0.12 | 0.6 | 0.65 | 0.82 | 0.62 | 0.63 | 0.64 |
| 3094: 169 | 639 | 0.96 | 1 | 1 | 1 | 1 | 1 | 0.6 | 0.75 | 1 | 1 | 1 | 1 | 1 | 1 |
| 3094: 195 | 665 | 0.8 | 0.79 | 1 | 0.091 | 0.92 | 1 | 0.54 | 0.36 | 0.94 | 0.89 | 0.96 | 0.9 | 0.87 | 0.75 |
| 3094: 342 | 812 | 0.84 | 0.97 | 1 | 0.37 | 0.85 | 0.96 | 0.86 | 1 | 0.82 | 0.98 | 0.97 | 1 | 0.63 | 0.97 |
| 3094: 393 | 863 | 1 | 0.91 | 0.93 | 1 | 0.96 | 0.85 | 0.94 | 0.88 | 0.92 | 0.94 | 0.89 | 0.92 | 0.87 | 1 |

| | MVP Position | | | | | | |
|---|---|---|---|---|---|---|---|
| | in ROI | Brain | Brain | Brain | Brain | Brain | Brain |
| 3094: 79 | 549 | 0.9 | 0.5 | 1 | 0.92 | 1 | 1 |
| 3094: 103 | 573 | 1 | 1 | 1 | 1 | 1 | 1 |
| 3094: 118 | 588 | 1 | 0.5 | 1 | 0.89 | 0.87 | 0.87 |
| 3094: 148 | 618 | 1 | 1 | 0.92 | 0.97 | 1 | 1 |
| 3094: 151 | 621 | 1 | 1 | 1 | 1 | 1 | 1 |
| 3094: 155 | 625 | 0.9 | 1 | 0.61 | 0.81 | NA | NA |
| 3094: 162 | 632 | 1 | 0.91 | 0.93 | 0.62 | 0.7 | 0.75 |
| 3094: 169 | 639 | 1 | 1 | 1 | 1 | 1 | 1 |
| 3094: 195 | 665 | 0.94 | 0.5 | 0.89 | 0.89 | 0.9 | 0.92 |
| 3094: 342 | 812 | 1 | 0.5 | 0.95 | 0.79 | 0.9 | 1 |
| 3094: 393 | 863 | 0.95 | 0.5 | 1 | 0.97 | 1 | 0.96 |

[0298] TABLE 8
(3103):

| | MVP | | | | | | | | | | | | |
|---|---|---|---|---|---|---|---|---|---|---|---|---|---|
| CpG | Position in | | | | | | | | | | | | |
| identifier | ROI | Prostate | Prostate | Prostate | Prostate | Prostate | Prostate | Prostate | Prostate | Muscle | Muscle | Muscle | Muscle |
| 3103: 41 | 1752 | NA | 1 | NA | 0.5 | NA | NA | 1 | 1 | NA | 0.12 | 0 | 0.62 |
| 3103: 47 | 1758 | NA | 0.76 | NA | 0.58 | 0 | 1 | 1 | 0.39 | 0.65 | NA | 0.58 | 0.5 |
| 3103: 76 | 1787 | 0.24 | 1 | 1 | 0.86 | 1 | 1 | 0 | 0.056 | 1 | 0.64 | 1 | 0.83 |
| 3103: 89 | 1800 | 1 | 1 | 0.83 | 0.99 | 1 | 1 | 0.98 | 0.34 | 1 | 1 | 1 | 1 |
| 3103: 106 | 1817 | 1 | 1 | 0.53 | 0.98 | 1 | 1 | 0 | 1 | 0.94 | 0.63 | 0.77 | 0.95 |
| 3103: 152 | 1863 | 1 | 0.67 | 1 | 0.98 | 1 | 1 | 0.98 | 0.75 | 0.94 | 1 | 1 | 0.83 |
| 3103: 163 | 1874 | 0.44 | 0.83 | 1 | 1 | 0 | 1 | 0 | 0.095 | 0.51 | 0.42 | 0.12 | 0.47 |
| 3103: 190 | 1901 | 1 | 0.58 | 0.84 | 0.78 | 1 | 1 | 0.92 | 0.0041 | 0.71 | 0.52 | 0.81 | 0.8 |
| 3103: 196 | 1907 | 1 | 1 | NA | 0.87 | 1 | 1 | 1 | 0.16 | 0.9 | 0.95 | 0.88 | 0.94 |
| 3103: 203 | 1914 | 1 | 0.54 | 0.83 | 1 | 1 | 1 | 0.84 | 0 | 0.74 | 0.57 | 0.44 | 0.55 |
| 3103: 227 | 1938 | 1 | 0.35 | 1 | 0.84 | 1 | 1 | 0.85 | 0.14 | 0.69 | 0.61 | 0.62 | 0.61 |
| 3103: 231 | 1942 | 1 | 1 | 0.74 | 1 | 1 | 0 | 0.9 | 0.1 | 0.83 | 0.93 | 0.58 | 0.69 |
| 3103: 238 | 1949 | 1 | 1 | NA | 0.94 | 0.95 | 1 | 0.96 | 0.94 | 0.73 | 1 | 0.84 | 0.91 |
| 3103: 279 | 1990 | 0.96 | 0.86 | 0.45 | 0.96 | 0.68 | 0.51 | 1 | 0.011 | 0.57 | 1 | 0.42 | 0.6 |
| 3103: 285 | 1996 | 0.47 | 0.33 | NA | 0.76 | 0.94 | 0.36 | 0.91 | 0.024 | 0.43 | 0 | 0.47 | 0.39 |
| 3103: 292 | 2003 | 1 | 1 | 0.48 | 1 | 0.93 | NA | 0.99 | 0 | 0.69 | 0.8 | 0.76 | 0.83 |
| 3103: 294 | 2005 | 0.51 | 0.42 | 0.68 | 1 | 0.78 | NA | 0.98 | 0 | 0.49 | 0.61 | 0.3 | 0.4 |
| 3103: 306 | 2017 | 0.95 | 0.9 | 0.84 | 0.92 | 0.6 | 0.099 | 1 | 0 | 0.84 | 0.93 | 0.4 | 0.78 |
| 3103: 311 | 2022 | 1 | 1 | NA | 1 | 1 | NA | 0.95 | 0.096 | 0.83 | 1 | 0.8 | 0.86 |
| 3103: 317 | 2028 | 0.83 | 1 | 0.65 | 1 | 1 | 1 | 1 | 0 | 0.93 | 0.5 | 0.91 | 0.95 |
| 3103: 319 | 2030 | 0.75 | 1 | 1 | 0.99 | 0.96 | 1 | 0.96 | 0.13 | 0.84 | 1 | 0.84 | 0.89 |
| 3103: 333 | 2044 | 1 | 0.69 | NA | 0.98 | 0.96 | 1 | 0 | 0.5 | 0.55 | 0.73 | 0.51 | 0.38 |
| 3103: 346 | 2057 | 0.035 | 0.77 | 0.61 | 1 | 1 | 0.3 | 0.012 | 0.023 | 0.73 | 0.76 | 0.42 | 0.68 |
| 3103: 365 | 2076 | 1 | 0.68 | NA | 1 | 1 | 1 | 1 | 0.013 | 0.49 | 0.56 | 0.46 | 0.4 |
| 3103: 378 | 2089 | 0.35 | NA | 0.83 | 1 | 0.96 | 1 | 1 | 0.67 | 0.65 | 0.53 | 0.18 | 0.58 |
| 3103: 384 | 2095 | 1 | 0.68 | NA | 1 | 1 | 1 | 1 | 0.77 | 0.71 | 0.88 | 0.7 | 0.8 |

| | MVP | | | | | | | | | | | | | | |
|---|---|---|---|---|---|---|---|---|---|---|---|---|---|---|---|
| CpG | Position | | | | | | | | | | | | | | |
| identifier | in ROI | Muscle | Lung | Lung | Lung | Lung | Lung | Liver | Liver | Breast | Breast | Breast | Breast | Breast | Breast |
| 3103: 41 | 1752 | 0.61 | 1 | 0 | NA | 1 | 1 | NA | 1 | 1 | NA | 1 | 0.14 | NA | 0.36 |
| 3103: 47 | 1758 | 0.88 | 0.82 | 1 | 1 | 1 | 1 | 0 | 1 | 1 | NA | 1 | 0.3 | 1 | NA |
| 3103: 76 | 1787 | 1 | 1 | 1 | 0.68 | 0.76 | 1 | 1 | 1 | 0.93 | NA | 0.77 | 1 | 1 | 0.5 |
| 3103: 89 | 1800 | 1 | 1 | 1 | NA | 1 | 1 | 1 | 1 | 1 | NA | 0.94 | 1 | 1 | 1 |
| 3103: 106 | 1817 | 0.64 | 1 | 1 | 1 | 1 | 1 | 1 | 1 | 0.55 | NA | 0.75 | 0.96 | 0.94 | 0.75 |
| 3103: 152 | 1863 | 0.84 | 1 | 1 | 0.73 | 1 | 1 | 1 | 1 | 0.79 | NA | 0.89 | 0.83 | 1 | 0.9 |
| 3103: 163 | 1874 | 0.55 | 0.88 | 1 | NA | 0.87 | 1 | 1 | 1 | 0.68 | NA | 0.36 | 0.31 | 0.63 | 0.37 |
| 3103: 190 | 1901 | 1 | 0.97 | 1 | 0.65 | 0.98 | 1 | 1 | 1 | 0.9 | NA | 0.84 | 0.43 | 0.85 | 0.89 |
| 3103: 196 | 1907 | 0.91 | 1 | 1 | 0.52 | 0.98 | 1 | 1 | 1 | 0.91 | NA | 0.83 | 0.93 | 0.77 | 0.83 |
| 3103: 203 | 1914 | 0.58 | 0.66 | 1 | 1 | 0.48 | 1 | 1 | 1 | 0.71 | NA | 0.59 | 0.46 | 0.48 | 0.2 |
| 3103: 227 | 1938 | 0.62 | 0.56 | 1 | 0.89 | 0.58 | 0.8 | 1 | 1 | 0.83 | NA | 0.69 | 0.31 | 0.69 | 0.53 |
| 3103: 231 | 1942 | 0.87 | 0.9 | 1 | 0.49 | 0.9 | 0.89 | 1 | 1 | 0.88 | NA | 0.89 | 0.82 | 0.79 | 0.78 |
| 3103: 238 | 1949 | 0.95 | 1 | 1 | NA | 1 | 1 | 1 | 1 | 0.66 | NA | 0.82 | 0.94 | 0.9 | 1 |
| 3103: 279 | 1990 | 0.57 | 0.75 | 0.62 | NA | 0.74 | 0.2 | 1 | 1 | 0.78 | 0.74 | 0.75 | 0.62 | 0.57 | 0.77 |
| 3103: 285 | 1996 | 0.47 | 0.63 | 0.54 | 0.24 | 0.64 | 0.56 | 1 | NA | 0.78 | 0.056 | 0.73 | 0.65 | 0.76 | 0.61 |
| 3103: 292 | 2003 | 0.87 | 0.9 | NA | 0.53 | 0.88 | NA | 1 | 1 | 1 | 0.75 | 0.93 | 0.97 | 0.88 | 0.97 |
| 3103: 294 | 2005 | 0.32 | 0.54 | 1 | NA | 0.56 | 1 | 0.86 | 1 | 0.5 | 0.62 | 0.52 | 0.52 | 0.59 | 0.48 |
| 3103: 306 | 2017 | 0.83 | 0.86 | 0.27 | 0.4 | 0.83 | 0.003 | 1 | NA | 0.87 | 0.56 | 0.87 | 1 | 0.85 | 0.63 |
| 3103: 311 | 2022 | 0.9 | 0.83 | 1 | 0.67 | 0.87 | NA | 1 | 1 | 0.92 | 0.57 | 0.86 | 0.76 | 0.91 | 0.88 |
| 3103: 317 | 2028 | 1 | 1 | 1 | 1 | 1 | 1 | 1 | 1 | 0.98 | 1 | 0.97 | 1 | 0.97 | 0.96 |
| 3103: 319 | 2030 | 0.93 | 0.97 | 1 | NA | 1 | 1 | 1 | 1 | 0.9 | 1 | 0.94 | 0.82 | 0.96 | 0.96 |
| 3103: 333 | 2044 | 0.4 | 0.6 | 1 | 0.22 | 0.55 | 1 | 1 | 1 | 0.55 | 0.53 | 0.58 | 0.56 | 0.53 | 0.59 |
| 3103: 346 | 2057 | 0.43 | 0.5 | NA | 0 | 0.78 | 1 | 1 | NA | 0.77 | 0.64 | 0.82 | 0.56 | 0.76 | 0.76 |
| 3103: 365 | 2076 | 0.45 | 0.56 | 1 | NA | 0.34 | 1 | 1 | NA | 0.75 | 0.23 | 0.6 | 0.52 | 0.67 | 0.29 |
| 3103: 378 | 2089 | 0.55 | 0.45 | NA | NA | 0.52 | 1 | 1 | 1 | 0.79 | 0 | 0.69 | 1 | 0.54 | 1 |
| 3103: 384 | 2095 | 0.56 | 0.56 | 1 | 0.5 | 0.62 | NA | 1 | NA | 0.85 | 0.59 | 0.77 | 0.81 | 0.74 | 0.55 |

| CpG | MVP Position in | | | | | | |
|---|---|---|---|---|---|---|---|
| identifier | ROI | Brain | Brain | Brain | Brain | Brain | Brain |
| 3103: 41 | 1752 | NA | 1 | NA | 1 | 0.95 | NA |
| 3103: 47 | 1758 | 1 | 0 | NA | 1 | 0.82 | 1 |
| 3103: 76 | 1787 | 1 | 1 | 1 | 1 | 1 | 1 |
| 3103: 89 | 1800 | 1 | 1 | 1 | 1 | 1 | 1 |
| 3103: 106 | 1817 | 1 | 1 | 1 | 1 | 1 | 1 |
| 3103: 152 | 1863 | 0.87 | 0.86 | 0.13 | 1 | 0.79 | 1 |
| 3103: 163 | 1874 | 0.76 | 0.97 | 0.12 | 0.95 | 0.76 | 0.39 |
| 3103: 190 | 1901 | 0.96 | 1 | 1 | 1 | 0.75 | 0.43 |
| 3103: 196 | 1907 | 0.93 | 1 | 1 | 1 | 0.9 | 0.84 |
| 3103: 203 | 1914 | NA | 1 | 0.91 | 0.76 | 0.71 | 0.28 |
| 3103: 227 | 1938 | 0.58 | 0.78 | 0.64 | 0.78 | 0.69 | 0.65 |
| 3103: 231 | 1942 | 0.93 | 0.93 | 1 | 0.95 | 0.78 | 0.96 |
| 3103: 238 | 1949 | 0.94 | 0.84 | 1 | 0.91 | 0.86 | 0.96 |
| 3103: 279 | 1990 | 0.82 | 0.88 | 0.98 | 1 | 0.72 | 0.74 |
| 3103: 285 | 1996 | 0.5 | 0.77 | 0.66 | 0.68 | 0.7 | 0.47 |
| 3103: 292 | 2003 | 0.89 | 0.87 | 1 | 1 | 0.88 | 0.88 |
| 3103: 294 | 2005 | 0.55 | 0.5 | 0.022 | 0.73 | 0.52 | 0.75 |
| 3103: 306 | 2017 | 1 | 0.87 | 0.97 | 0.9 | 0.82 | 0.77 |
| 3103: 311 | 2022 | 0.94 | 0.9 | 1 | 1 | 0.9 | 0.96 |
| 3103: 317 | 2028 | 0.96 | 0.97 | 1 | 1 | 0.95 | 1 |
| 3103: 319 | 2030 | 0.95 | 0.97 | 0.96 | 1 | 0.88 | 0.98 |
| 3103: 333 | 2044 | 0.61 | 0.7 | 0.93 | 0.65 | 0.65 | 0.81 |
| 3103: 346 | 2057 | 0.76 | 0.86 | 0.92 | 0.39 | 0.61 | 0.91 |
| 3103: 365 | 2076 | 0.77 | 1 | 1 | 1 | 0.6 | 0.65 |
| 3103: 378 | 2089 | 0.54 | 0.5 | 0.62 | 0.53 | 0.67 | 1 |
| 3103: 384 | 2095 | 0.83 | 0.85 | 1 | 0.93 | 0.73 | 1 |

[0299] TABLE 9
(3104):

| CpG | MVP Position in | | | | | | | | | | | | |
|---|---|---|---|---|---|---|---|---|---|---|---|---|---|
| identifier | ROI | Prostate | Prostate | Prostate | Muscle | Muscle | Muscle | Muscle | Muscle | Lung | Lung | Lung | Lung |
| 3104: 75 | 1818 | 0.54 | 0 | 0.96 | 0.89 | 0.85 | 0.96 | 1 | 0.93 | 0.82 | 1 | 0.69 | 1 |
| 3104: 79 | 1822 | 0.75 | 0.93 | 1 | 0.86 | 1 | 0.89 | 0.95 | 0.97 | 0.95 | 1 | 0.45 | 1 |
| 3104: 132 | 1875 | 0.93 | 0.21 | 0.86 | 0.68 | 0.83 | 0.019 | 0.69 | 0.81 | 0.85 | 1 | 0 | 0 |
| 3104: 137 | 1880 | 1 | 0.25 | 0.72 | 0.75 | 0.84 | NA | 0.77 | 0.91 | 0.52 | 1 | 0.74 | 0.74 |
| 3104: 245 | 1988 | 1 | 1 | 1 | 0.96 | 0.79 | 0 | 0.78 | 0.9 | 1 | 1 | 0.92 | 1 |
| 3104: 249 | 1992 | 1 | 1 | 1 | 0.96 | 0.47 | 1 | 1 | 1 | 1 | 1 | 0.71 | 0.82 |
| 3104: 254 | 1997 | 0.92 | 0 | 0.66 | 0.59 | 1 | 1 | 0.48 | 0.64 | 0.61 | 1 | 0.19 | 0.33 |
| 3104: 302 | 2045 | 0.87 | 1 | 1 | 1 | 1 | NA | 1 | 1 | 0.96 | 1 | 1 | 1 |
| 3104: 306 | 2049 | 1 | 1 | 1 | 1 | 1 | 0.47 | 0.87 | 0.74 | 1 | 1 | 0.91 | 0.69 |
| 3104: 333 | 2076 | 1 | 0.97 | 1 | 0.72 | 1 | 0 | 0.84 | 0.47 | 0.81 | 0.13 | 1 | 1 |
| 3104: 349 | 2092 | 1 | 0.67 | 0.93 | 0.75 | 1 | 1 | 0.63 | 0.55 | 0.83 | 1 | 0.34 | 0.36 |
| 3104: 361 | 2104 | 1 | 1 | 1 | 0.78 | 0.9 | 0.65 | 0.92 | 1 | 1 | 0.5 | 0.91 | 1 |
| 3104: 386 | 2129 | NA | 1 | 1 | 0.87 | 1 | 0.86 | 0.87 | 0.67 | 0.92 | 0.5 | 1 | 1 |
| 3104: 425 | 2168 | 1 | 0.96 | 1 | 0.68 | 1 | 1 | 1 | 0.69 | 0.7 | 0.63 | 1 | 1 |
| 3104: 475 | 2218 | NA | NA | NA | NA | NA | NA | NA | 1 | 1 | 0.92 | NA | NA |

| | MVP | | | | | | | | | | | | | | |
|---|---|---|---|---|---|---|---|---|---|---|---|---|---|---|---|
| CpG | Position | | | | | | | | | | | | | | |
| identifier | in ROI | Liver | Liver | Breast | Breast | Breast | Breast | Breast | Breast | Brain | Brain | Brain | Brain | Brain | Brain |
| 3104: 75 | 1818 | 0.44 | 0.15 | 0.88 | 0.58 | 0.82 | 1 | 0.86 | 0.6 | 0.98 | 0.98 | 1 | 1 | 1 | 1 |
| 3104: 79 | 1822 | 0 | 0.13 | 0.92 | 0.77 | 0.87 | 0.97 | 0.99 | 0.81 | 1 | 1 | 1 | 1 | 1 | 1 |
| 3104: 132 | 1875 | 0.27 | 0.32 | 0.28 | 0.54 | 0.55 | 0.72 | 0.68 | 0.61 | 0.73 | 0.95 | 1 | 0.9 | 0.57 | 0.59 |
| 3104: 137 | 1880 | 0.42 | 0.41 | 0.6 | 0.41 | 0.43 | 0.73 | 0.74 | 0.6 | 0.82 | 0.74 | 1 | 0.75 | 0.8 | 0.69 |
| 3104: 245 | 1988 | 0.75 | 0.6 | 0.96 | 1 | 1 | 0.97 | 0.94 | 0.92 | 1 | 1 | 1 | 0.89 | 0.62 | 0.95 |
| 3104: 249 | 1992 | 0.55 | 0.61 | 1 | 1 | 0.91 | 1 | 1 | 1 | 1 | 1 | 1 | 1 | 1 | 1 |
| 3104: 254 | 1997 | 0.55 | 0.31 | 0.39 | 0.67 | 0.49 | 0.58 | 1 | 0.5 | 0.6 | 0.94 | 1 | 0.78 | NA | 0.38 |
| 3104: 302 | 2045 | 0.93 | 1 | 1 | 1 | 0.78 | 0.95 | 1 | 1 | 1 | 1 | 1 | 1 | 1 | 1 |
| 3104: 306 | 2049 | 1 | 0.76 | 0.94 | 0.96 | 1 | 1 | 1 | 1 | 1 | 1 | 1 | 0.5 | 0.76 | 1 |
| 3104: 333 | 2076 | 0.64 | 0.38 | 0.9 | 0.85 | 0.8 | 1 | 0.73 | 0.85 | 1 | 1 | 1 | 1 | 1 | 1 |
| 3104: 349 | 2092 | 0.7 | 0.49 | 0.48 | 0.9 | 0.66 | 0.88 | 0.83 | 0.56 | 0.82 | 1 | 1 | 1 | 0.63 | 0.63 |
| 3104: 361 | 2104 | 1 | 1 | 1 | 1 | 1 | 1 | 1 | 1 | 1 | 1 | 1 | 1 | 1 | 1 |
| 3104: 386 | 2129 | 1 | 1 | 1 | 1 | 1 | 1 | 0.72 | 1 | 1 | 1 | 1 | 1 | 1 | 1 |
| 3104: 425 | 2168 | 0.85 | 1 | 0.85 | 1 | 1 | 1 | 0.79 | 0.83 | 0.88 | 1 | 1 | 0.9 | 1 | 1 |
| 3104: 475 | 2218 | NA | 1 | NA | 0.87 | NA | NA | NA | NA | NA | 0.9 | 0 | NA | NA | NA |

[0300] TABLE 10
(3105):

| | MVP | | | | | | | | | | | | |
|---|---|---|---|---|---|---|---|---|---|---|---|---|---|
| CpG | Position in | | | | | | | | | | | | |
| identifier | ROI | Prostate | Prostate | Prostate | Prostate | Prostate | Prostate | Prostate | Muscle | Muscle | Muscle | Muscle | Muscle |
| 3105: 45 | 300 | 1 | 1 | 1 | 0.74 | 1 | 1 | 0.75 | 0.95 | 1 | 1 | 0.5 | 1 |
| 3105: 64 | 319 | 0.76 | 0.51 | 0.59 | 1 | 0.66 | 0.55 | 0 | 0.29 | 0.23 | 0.25 | 0.074 | 0.42 |
| 3105: 73 | 328 | 1 | 1 | 1 | 0.61 | 1 | 1 | 0.88 | 1 | 1 | 1 | 0.97 | 1 |
| 3105: 85 | 340 | 1 | 0.95 | 1 | 1 | 1 | 1 | 0.86 | 0.94 | 0.92 | 1 | 1 | 1 |
| 3105: 97 | 352 | 0.87 | 1 | 0.42 | 0.67 | 0.74 | 0 | 0.88 | 0.9 | 0.67 | 0.79 | 0.68 | 0.69 |
| 3105: 132 | 387 | 0.97 | 1 | 1 | 1 | 0.98 | 1 | 0.026 | 0.86 | 0.78 | 1 | 1 | 0.94 |
| 3105: 136 | 391 | 1 | 0.95 | 1 | 0.61 | 0.94 | 1 | 0.075 | 0.78 | 1 | 0.9 | 0.8 | 0.96 |
| 3105: 151 | 406 | 1 | 1 | 1 | 0.73 | 1 | 1 | 0.081 | 1 | 1 | 1 | 1 | 1 |
| 3105: 163 | 418 | 1 | 0.69 | 0.74 | 0.65 | 0.77 | 0.08 | 0.84 | 0.71 | 0.76 | 0.96 | 0.71 | 0.92 |
| 3105: 172 | 427 | 1 | 1 | 1 | 1 | 1 | 1 | 0.86 | 1 | 1 | 1 | 1 | 1 |
| 3105: 193 | 448 | 1 | 1 | 1 | 0.56 | 1 | 1 | 0.73 | 0.96 | 1 | 1 | 0.91 | 1 |
| 3105: 202 | 457 | 1 | 1 | 1 | 0.13 | 0.98 | 0.84 | 0 | 1 | 0.9 | 1 | 0.84 | 1 |
| 3105: 256 | 511 | 0.96 | 0.94 | 0.98 | 0.76 | 1 | 0.79 | 0.91 | 0.68 | 0.36 | 0.7 | 0.67 | 0.95 |
| 3105: 280 | 535 | 1 | 0.83 | 0.82 | 0.77 | 0.88 | 0.67 | 0.95 | 0.53 | 0.86 | 0.26 | 0.33 | 0.61 |
| 3105: 301 | 556 | 0.97 | 1 | 0.38 | 0.5 | 0.94 | 0.5 | 0.95 | 0.44 | 0 | 0.51 | 0.19 | 0.45 |
| 3105: 337 | 592 | 1 | 0.93 | 1 | 1 | 0.36 | 0.81 | 0.85 | 0.19 | 0.25 | 0.38 | 0.33 | 0.48 |
| 3105: 364 | 619 | 1 | 1 | 1 | 0.06 | 1 | 1 | 0 | 0.9 | 1 | 1 | 0.9 | 1 |
| 3105: 367 | 622 | 0.92 | 0.57 | 1 | 0 | 0.79 | 1 | 0 | 0.14 | 0 | 0.18 | 0.026 | 0.31 |
| 3105: 375 | 630 | 1 | 1 | 1 | 0.67 | 0.93 | 0.4 | 0 | 0.43 | 0 | 0.39 | 0.24 | 0.92 |

| | MVP | | | | | | | | | | | | | | |
|---|---|---|---|---|---|---|---|---|---|---|---|---|---|---|---|
| CpG | Position in | | | | | | | | | | | | | | |
| identifier | ROI | Lung | Lung | Lung | Lung | Lung | Liver | Liver | Breast | Breast | Breast | Breast | Breast | Breast | Brain |
| 3105: 45 | 300 | 1 | 1 | 1 | 1 | 1 | 1 | 1 | 0.5 | 0.62 | 0.58 | 0.74 | 0.23 | 0.41 | 1 |
| 3105: 64 | 319 | 0.77 | 0.79 | 1 | 0.91 | 0.9 | 1 | 0.88 | 0.2 | 0.098 | 0.1 | 0.79 | 0.18 | 0.19 | 0.9 |
| 3105: 73 | 328 | 1 | 0.94 | 1 | 1 | 1 | 1 | 1 | 0.53 | 0.61 | 0.5 | 0.96 | 0.53 | 0.79 | 1 |
| 3105: 85 | 340 | 1 | 1 | 1 | 1 | 0.97 | 1 | 1 | 0.66 | 0.87 | 0.69 | 0.71 | 0.78 | 0.58 | 0.72 |
| 3105: 97 | 352 | 0.98 | 0.5 | 0 | 1 | 1 | 1 | 1 | 0.29 | 0.83 | 0.26 | 0.92 | 0.78 | 0.75 | 0.99 |
| 3105: 132 | 387 | 1 | 1 | 1 | 0.99 | 1 | 1 | 1 | 0.32 | 0.64 | 0.59 | 0.92 | 0.68 | 0.72 | 0.98 |
| 3105: 136 | 391 | 1 | 1 | 0 | 1 | 1 | 1 | 1 | 0.53 | 0.56 | 0.76 | 0.83 | 0.57 | 0.49 | 0.96 |
| 3105: 151 | 406 | 1 | 1 | 1 | 1 | 1 | 1 | 1 | 0.71 | 0.93 | 0.77 | 1 | 0.96 | 0.93 | 1 |
| 3105: 163 | 418 | 1 | 0.9 | 1 | 0.82 | 1 | 1 | 1 | 0.44 | 0.6 | 0.39 | 0.65 | 0.38 | 0.48 | 0.97 |
| 3105: 172 | 427 | 1 | 1 | 1 | 1 | 1 | 1 | 1 | 0.88 | 0.94 | 1 | 1 | 0.93 | 1 | 1 |
| 3105: 193 | 448 | 1 | 0.97 | 1 | 1 | 1 | 1 | 1 | 0.67 | 0.9 | 0.81 | 0.88 | 0.69 | 0.72 | 1 |
| 3105: 202 | 457 | 1 | 0.98 | 1 | 1 | 1 | 1 | 1 | 0.63 | 0.82 | 0.67 | 0.94 | 0.66 | 0.74 | 1 |
| 3105: 256 | 511 | 0.87 | 0.9 | 1 | 0.97 | 1 | 0.89 | 0.9 | 0.41 | 0.56 | 0.4 | 0.87 | 0.45 | 0.6 | 0.95 |
| 3105: 280 | 535 | 1 | 0.6 | 1 | 1 | 0.96 | 1 | 1 | 0.45 | 0.68 | 0.33 | 0.84 | 0.37 | 0.5 | 1 |
| 3105: 301 | 556 | 1 | 0.77 | 1 | 1 | 0.5 | 1 | 1 | 0.47 | 0.49 | 0.62 | 0.96 | 0.51 | 0.74 | 1 |
| 3105: 337 | 592 | 1 | 1 | 1 | 1 | 1 | 0.95 | 1 | 0.48 | 0.62 | 0.88 | 0.59 | 0.38 | 0.47 | 1 |
| 3105: 364 | 619 | 1 | 1 | 1 | 1 | 1 | 1 | 1 | 0.81 | 0.85 | 0.84 | 1 | 0.81 | 0.83 | 1 |
| 3105: 367 | 622 | 0.85 | 1 | 1 | 1 | 0 | 1 | 1 | 0.24 | 0 | 0.42 | 1 | 0 | 0.74 | 0.93 |
| 3105: 375 | 630 | 0.92 | 0.83 | 1 | 0.97 | NA | 0.94 | 0.96 | 0.4 | 0.29 | 0.22 | 1 | 0.46 | 0.29 | 1 |

| CpG | MVP Position in | | | | | |
|---|---|---|---|---|---|---|
| identifier | ROI | Brain | Brain | Brain | Brain | Brain |
| 3105: 45 | 300 | 1 | 1 | 1 | 1 | 0.92 |
| 3105: 64 | 319 | 0.87 | 0.027 | 0.68 | 0.81 | 0.8 |
| 3105: 73 | 328 | 1 | 1 | 1 | 1 | 0.97 |
| 3105: 85 | 340 | 0.97 | 1 | 1 | 1 | 1 |
| 3105: 97 | 352 | 0.91 | 1 | 1 | 0.99 | 0.93 |
| 3105: 132 | 387 | 1 | 1 | 0.8 | 1 | 0.9 |
| 3105: 136 | 391 | 1 | 1 | 1 | 0.97 | 1 |
| 3105: 151 | 406 | 1 | 1 | 1 | 1 | 1 |
| 3105: 163 | 418 | 1 | 1 | 1 | 1 | 1 |
| 3105: 172 | 427 | 1 | 1 | 1 | 1 | 1 |
| 3105: 193 | 448 | 1 | 1 | 1 | 1 | 1 |
| 3105: 202 | 457 | 1 | 1 | 0.98 | 1 | 0.98 |
| 3105: 256 | 511 | 1 | 0.95 | 1 | 1 | 0.97 |
| 3105: 280 | 535 | 1 | 1 | 1 | 1 | 1 |
| 3105: 301 | 556 | 0.9 | 1 | 1 | 1 | 1 |
| 3105: 337 | 592 | 1 | 1 | 1 | 0.89 | 0.85 |
| 3105: 364 | 619 | 1 | 1 | 0.9 | 1 | 1 |
| 3105: 367 | 622 | 1 | 1 | 1 | 0.93 | 0.87 |
| 3105: 375 | 630 | 1 | 1 | 1 | 1 | 1 |

[0301] TABLE 11
(3107):

| | MVP | | | | | | | | | | | | |
|---|---|---|---|---|---|---|---|---|---|---|---|---|---|
| CpG | Position in | | | | | | | | | | | | |
| identifier | ROI | Prostate | Prostate | Muscle | Muscle | Muscle | Muscle | Muscle | Lung | Lung | Lung | Lung | Liver |
| 3107: 58 | 336 | 1 | 1 | 1 | 0.83 | 1 | 1 | 0.81 | 1 | 1 | 1 | 1 | 0.72 |
| 3107: 60 | 338 | 0.97 | 1 | 1 | 1 | 1 | 1 | 1 | 1 | 1 | 1 | 1 | 1 |
| 3107: 80 | 358 | 1 | 1 | 1 | 0.94 | 1 | 1 | 1 | 1 | 0.59 | 1 | 1 | 1 |
| 3107: 97 | 375 | 0.99 | 1 | 1 | 1 | 1 | 1 | 0.96 | 1 | 0.66 | 1 | 0.97 | 1 |
| 3107: 100 | 378 | 1 | 1 | 1 | 0.96 | 0.38 | 1 | 0.97 | 1 | 0.9 | 1 | 0.98 | 1 |
| 3107: 120 | 398 | 1 | 0.82 | 0.77 | 0.97 | 0.57 | 1 | 0.91 | 0.95 | 0.94 | 0.85 | 0.88 | 0.97 |
| 3107: 137 | 415 | 0.98 | 0.95 | 0.94 | 1 | 1 | 1 | 0.82 | 1 | 1 | 0.95 | 0.96 | 0.99 |
| 3107: 139 | 417 | 0.98 | 1 | 1 | 1 | 1 | 1 | 1 | 0.86 | 1 | 1 | 0.96 | 0.98 |
| 3107: 148 | 426 | 1 | 0.98 | 0.81 | 1 | 0.99 | 0.98 | 0.95 | 1 | 1 | 0.92 | 0.97 | 1 |
| 3107: 164 | 442 | 1 | 0.95 | 1 | 1 | 1 | 0.95 | 0.75 | 0.98 | 1 | 1 | 0.72 | 0.98 |
| 3107: 187 | 465 | 0.82 | 0.98 | 0.92 | 1 | 0.57 | 0.83 | 0.81 | 0.91 | 0.99 | 1 | 0.92 | 0.79 |
| 3107: 190 | 468 | 0.71 | 0.94 | 1 | 0.81 | 0.15 | 0.75 | 0.77 | 0.85 | 1 | 0.66 | 0.89 | 0.75 |
| 3107: 209 | 487 | 0.95 | 0.87 | 0.65 | 0.69 | 0.91 | 0.68 | 0.53 | 0.33 | 1 | 0.63 | 0.64 | 0.59 |
| 3107: 224 | 502 | 0.84 | 0.93 | 1 | 1 | 0.97 | 0.97 | 0.84 | 0.79 | 0.97 | 0.88 | 0.93 | 0.97 |
| 3107: 233 | 511 | 0.76 | 0.83 | 0.55 | 0.84 | 0.69 | 0.77 | 0.68 | 0.58 | 0.65 | 0.83 | 0.68 | 0.49 |
| 3107: 243 | 521 | 1 | 0.96 | 0.88 | 0.97 | 0.98 | 0.93 | 0.95 | 0.83 | 0.82 | 0.73 | 0.89 | 0.68 |
| 3107: 257 | 535 | 0.82 | 1 | 0.78 | 0.72 | 1 | 0.72 | 0.79 | 0.44 | 0.56 | 0.58 | 0.74 | 0.43 |
| 3107: 265 | 543 | 0.95 | 0.94 | 1 | 0.98 | 0.96 | 0.87 | 1 | 0.69 | 0.64 | 0.65 | 0.79 | 0.54 |
| 3107: 400 | 678 | 0.65 | 0.94 | 0.81 | 1 | 0.98 | 1 | 0.99 | 0.37 | 0.34 | 0.53 | 0.76 | 0.84 |

| | MVP | | | | | | | | | | | | |
|---|---|---|---|---|---|---|---|---|---|---|---|---|---|
| CpG | Position in | | | | | | | | | | | | |
| identifier | ROI | Liver | Breast | Breast | Breast | Breast | Breast | Breast | Brain | Brain | Brain | Brain | Brain |
| 3107: 58 | 336 | 1 | 1 | 1 | 1 | 0.91 | 1 | 1 | 0.88 | 1 | 0.5 | 1 | 1 |
| 3107: 60 | 338 | 1 | 1 | 0.96 | 1 | 1 | 1 | 1 | 1 | 1 | 1 | 1 | 1 |
| 3107: 80 | 358 | 1 | 1 | 0.94 | 1 | 1 | 1 | 1 | 1 | 1 | 1 | 1 | 1 |
| 3107: 97 | 375 | 1 | 1 | 1 | 1 | 1 | 1 | 1 | 1 | 1 | 1 | 1 | 1 |
| 3107: 100 | 378 | 1 | 0.95 | 0.96 | 0.99 | 0.85 | 0.93 | 1 | 0.93 | 1 | 1 | 0.94 | 1 |
| 3107: 120 | 398 | 1 | 0.84 | 0.78 | 0.87 | 0.84 | 0.88 | 0.72 | 0.89 | 1 | 0.91 | 0.88 | 0.95 |
| 3107: 137 | 415 | 1 | 0.9 | 0.85 | 0.98 | 0.96 | 0.89 | 0.93 | 0.92 | 0.94 | 1 | 0.95 | 0.98 |
| 3107: 139 | 417 | 1 | 0.93 | 0.88 | 0.99 | 0.97 | 0.98 | 0.98 | 0.95 | 0.98 | 0.93 | 0.95 | 0.98 |
| 3107: 148 | 426 | 1 | 0.88 | 0.88 | 0.94 | 0.86 | 0.94 | 0.91 | 0.92 | 1 | 1 | 0.85 | 0.92 |
| 3107: 164 | 442 | 1 | 0.88 | 0.96 | 0.87 | 0.67 | 0.93 | 0.54 | 0.96 | 1 | 1 | 0.85 | 0.89 |
| 3107: 187 | 465 | 0.94 | 0.8 | 0.79 | 0.72 | 0.64 | 0.75 | 0.72 | 0.91 | 0.96 | 0.78 | 0.89 | 0.93 |
| 3107: 190 | 468 | 0.93 | 0.58 | 0.63 | 0.56 | 0.45 | 0.8 | 0.46 | 0.79 | 0.93 | 0.68 | 0.66 | 0.61 |
| 3107: 209 | 487 | 0.88 | 0.61 | 0.7 | 0.41 | 0.3 | 0.66 | 0.42 | 0.73 | 1 | 0.77 | 0.74 | 0.78 |
| 3107: 224 | 502 | 0.93 | 0.86 | 0.78 | 0.73 | 0.9 | 0.94 | 0.83 | 0.95 | 0.95 | 0.96 | 0.93 | 1 |
| 3107: 233 | 511 | 0.81 | 0.49 | 0.76 | 0.52 | 0.52 | 0.7 | 0.5 | 0.77 | 0.83 | 0.84 | 0.8 | 0.85 |
| 3107: 243 | 521 | 0.87 | 0.7 | 0.78 | 0.75 | 0.56 | 0.8 | 0.71 | 0.81 | 0.96 | 0.88 | 0.91 | 0.84 |
| 3107: 257 | 535 | 0.94 | 0.62 | 0.91 | 0.61 | 0.53 | 0.64 | 0.28 | 0.7 | 0.97 | 0.79 | 0.83 | 0.86 |
| 3107: 265 | 543 | 0.92 | 0.66 | 0.69 | 0.8 | 0.53 | 0.89 | 0.3 | 0.97 | 0.82 | 0.85 | 0.87 | 0.88 |
| 3107: 400 | 678 | 1 | 0.88 | 0.93 | 1 | 0.77 | 1 | 1 | 0.93 | NA | 1 | 1 | 1 |

[0302] TABLE 12
(3110):

| | MVP | | | | | | | | | | | | |
|---|---|---|---|---|---|---|---|---|---|---|---|---|---|
| CpG | Position in | | | | | | | | | | | | |
| identifier | ROI | Prostate | Prostate | Prostate | Prostate | Prostate | Muscle | Muscle | Muscle | Muscle | Muscle | Lung | Lung |
| 3110: 32 | 1933 | 0.82 | NA | 0.86 | 0.72 | 0.9 | 0.66 | 0.73 | 0.94 | 0.73 | 0.9 | 0.83 | 1 |
| 3110: 84 | 1985 | 0.83 | NA | 1 | 0.7 | 1 | 0.12 | 0.34 | 0 | 0.2 | 0.38 | 0.86 | 1 |
| 3110: 286 | 2187 | 1 | NA | 1 | 1 | 1 | 0.95 | 0.71 | 0.9 | 0.97 | 0.79 | 1 | 1 |
| 3110: 310 | 2211 | 1 | NA | 1 | 0.87 | 1 | 0.28 | 0.43 | 0.43 | 0.59 | 0.6 | 0.9 | 0.97 |
| 3110: 366 | 2267 | 1 | 1 | 0 | 0.84 | 1 | 0.74 | 0.68 | 0.91 | 0.86 | 0.97 | 1 | 1 |
| 3110: 370 | 2271 | 1 | 0.68 | 1 | 0.92 | 1 | 0.67 | 0.69 | 0.93 | 0.88 | 1 | 1 | 1 |
| 3110: 415 | 2316 | 1 | 0.53 | 1 | 0.79 | 1 | 0.61 | 0.55 | 1 | 0.79 | 1 | 1 | 1 |

| | MVP | | | | | | | | | | | | | | |
|---|---|---|---|---|---|---|---|---|---|---|---|---|---|---|---|
| CpG | Position in | | | | | | | | | | | | | | |
| identifier | ROI | Lung | Lung | Liver | Liver | Breast | Breast | Breast | Breast | Breast | Brain | Brain | Brain | Brain | Brain |
| 3110: 32 | 1933 | 0.84 | 0.86 | 1 | 0.88 | 0.87 | 1 | 0.87 | 0.83 | 0.89 | 0.55 | 0.63 | 1 | 0.52 | 0.51 |
| 3110: 84 | 1985 | 1 | 1 | 1 | 0.86 | 1 | 0.8 | 0.75 | 0.86 | 0.5 | 0.51 | 0.17 | 1 | 0.23 | 0.4 |
| 3110: 286 | 2187 | 1 | 1 | 1 | 1 | 0.98 | 0.81 | 1 | 1 | 1 | 0.78 | 0.84 | 1 | 0.7 | 0.88 |
| 3110: 310 | 2211 | 0.91 | 0.95 | 1 | 0.94 | 0.61 | 0 | 0.63 | 0.69 | 0.76 | 0.54 | 0.7 | 1 | 0.54 | 0.7 |
| 3110: 366 | 2267 | 0.93 | 1 | 1 | 1 | 0.78 | 0.35 | 0.84 | 0.98 | 0.84 | 0.87 | 0.84 | 1 | 0.71 | 0.86 |
| 3110: 370 | 2271 | 0.92 | 1 | 1 | 1 | 0.79 | 0.61 | 0.91 | 1 | 0.95 | 0.89 | 0.85 | 1 | 0.71 | 0.93 |
| 3110: 415 | 2316 | 0.93 | 0.89 | 0.68 | 1 | 0.6 | 0.27 | 0.65 | 1 | 0.66 | 0.88 | 0.65 | 1 | 0.67 | 0.79 |

| | MVP | |
|---|---|---|
| CpG | Position in | |
| identifier | ROI | Brain |
| 3110: 32 | 1933 | 0.69 |
| 3110: 84 | 1985 | 0.83 |
| 3110: 286 | 2187 | 0.91 |
| 3110: 310 | 2211 | 0.8 |
| 3110: 366 | 2267 | 0.87 |
| 3110: 370 | 2271 | 1 |
| 3110: 415 | 2316 | 1 |

[0303] TABLE 13
(3113):

| | MVP | | | | | | | | | | | | |
|---|---|---|---|---|---|---|---|---|---|---|---|---|---|
| CpG | Position in | | | | | | | | | | | | |
| identifier | ROI | Prostate | Prostate | Prostate | Prostate | Prostate | Prostate | Muscle | Muscle | Muscle | Muscle | Muscle | Lung |
| 3113: 42 | 61 | 0.7 | 1 | NA | 0.82 | 1 | NA | 0.42 | 0.55 | 0 | 0.23 | 0.79 | 0.35 |
| 3113: 47 | 66 | NA | NA | NA | NA | 1 | NA | 1 | 0.5 | 0 | 0.8 | 0.65 | 1 |
| 3113: 72 | 91 | 0.89 | NA | 0 | 0.78 | 1 | NA | 0.37 | 0.076 | 0.59 | 0.3 | 0.26 | 0.85 |
| 3113: 78 | 97 | 0.47 | 1 | 0 | 0.75 | 1 | NA | 0.5 | 0.51 | 0.6 | 0.36 | 0.033 | 0.77 |
| 3113: 86 | 105 | 0.66 | 1 | 0 | 0.83 | 1 | NA | 0.5 | 0.4 | 0 | 0 | 0 | 0.79 |
| 3113: 116 | 135 | 0.63 | 1 | 0 | 0.6 | 1 | 0.081 | 0.4 | 0.69 | 0.24 | 0.31 | 0.48 | 0.59 |
| 3113: 156 | 175 | 0.96 | 0.96 | 0.18 | 0.73 | 1 | 0.36 | 0.5 | 0.56 | 0.067 | 0.46 | 0.12 | 1 |
| 3113: 160 | 179 | 0.65 | 0.58 | 0 | 1 | 1 | NA | 0.41 | 0.61 | 0.64 | 0.59 | 1 | 0.95 |
| 3113: 164 | 183 | 0.79 | 0.78 | 0 | 0.5 | 0 | 0 | 0.49 | 0.38 | 0.082 | 0.27 | 0.12 | 1 |
| 3113: 182 | 201 | 0.76 | 1 | 0 | 0.68 | 1 | NA | 0.24 | 0.56 | 0.34 | 0.47 | 0.54 | 0.91 |
| 3113: 189 | 208 | 1 | 1 | 0.086 | 0.92 | 1 | NA | 0.8 | 0.82 | 0 | 0.85 | 0.64 | 1 |
| 3113: 197 | 216 | 1 | 1 | 0 | 0.88 | 1 | NA | 0.84 | 0.8 | 0.32 | 0.74 | 0.83 | 1 |
| 3113: 298 | 317 | NA | NA | NA | 0 | NA | NA | NA | NA | NA | NA | NA | NA |
| 3113: 303 | 322 | 0.57 | 0.037 | 0.78 | 0.82 | 1 | NA | 0.76 | 0.68 | 0.73 | 0.85 | 0.88 | 0.95 |
| 3113: 378 | 397 | 0.35 | 0.37 | 0 | 0 | 1 | NA | 0.28 | 0.1 | 0.14 | 0 | 0 | 0.28 |
| 3113: 400 | 419 | 1 | 0.81 | 0.25 | 1 | 1 | NA | 0.73 | 0.84 | 0.18 | 0.95 | 0.62 | 0.75 |
| 3113: 406 | 425 | 0.92 | 1 | 1 | 0.94 | 1 | NA | 0.95 | 0.68 | 1 | 0.79 | 0.93 | 0.99 |

| | MVP | | | | | | | | | | | | | |
|---|---|---|---|---|---|---|---|---|---|---|---|---|---|---|
| CpG | Position in | | | | | | | | | | | | | |
| identifier | ROI | Lung | Lung | Lung | Lung | Liver | Liver | Breast | Breast | Breast | Breast | Breast | Brain | Brain |
| 3113: 42 | 61 | 1 | 0 | 1 | 1 | NA | 0.83 | 0 | NA | 0.77 | 0.54 | 0.89 | 0.92 | 1 |
| 3113: 47 | 66 | 1 | 1 | 1 | 0.82 | NA | 1 | NA | NA | 1 | 1 | 0.37 | 0.8 | 0.78 |
| 3113: 72 | 91 | 1 | NA | 1 | 1 | 0 | 0.33 | 0.55 | 0 | 0.58 | 0.21 | 0.58 | 0.67 | 0.62 |
| 3113: 78 | 97 | 1 | NA | 1 | 1 | 0.31 | 0.37 | 0.55 | 0 | 0.5 | 0.6 | 0.4 | 0.92 | 1 |
| 3113: 86 | 105 | 0.82 | 0.85 | 1 | 0.93 | 0.56 | 0.75 | 0.23 | 0 | 0.21 | 0.7 | 0.17 | 0.98 | 1 |
| 3113: 116 | 135 | 0.91 | 1 | 0.79 | 1 | 0.45 | 0.59 | 0.31 | 0.41 | 0.31 | 0.53 | 0.43 | 0.8 | 1 |
| 3113: 156 | 175 | 1 | 0.52 | 1 | 1 | 0 | 0.63 | 0.56 | 1 | 0.82 | 0.74 | 0.22 | 1 | 1 |
| 3113: 160 | 179 | 1 | 0.66 | 1 | 0.78 | 0.37 | 0.75 | 0.62 | 0.29 | 0.65 | 0.63 | 0.6 | 0.9 | 0.87 |
| 3113: 164 | 183 | 0.91 | 1 | 1 | 0.84 | NA | 0.31 | 0.43 | 0.75 | 0.29 | 0.72 | 0.39 | 1 | 0.75 |
| 3113: 182 | 201 | 1 | 0.44 | 1 | 1 | 0 | 0.43 | 0.47 | 0.78 | 0.53 | 0.63 | 0.26 | 1 | 0.9 |
| 3113: 189 | 208 | 1 | 1 | 1 | 1 | 1 | 0.87 | 0.57 | 1 | 0.76 | 0.8 | 0.52 | 1 | 1 |
| 3113: 197 | 216 | 1 | 0.31 | 1 | 1 | NA | 0.88 | 0.37 | 1 | 0.61 | 0.7 | 0.41 | 1 | 1 |
| 3113: 298 | 317 | NA | NA | NA | NA | 1 | 0 | NA | 0.46 | NA | NA | NA | 0.57 | NA |
| 3113: 303 | 322 | 0.97 | 0.84 | 0.91 | 1 | 1 | 0.93 | 0.56 | 0.56 | 0.75 | 0.59 | 0.62 | 0.92 | 0.95 |
| 3113: 378 | 397 | 0.48 | NA | 0.49 | 0.46 | 0.52 | 0 | 0.15 | 0.21 | 0.39 | 0.065 | 0.45 | 0.4 | 0.56 |
| 3113: 400 | 419 | 1 | NA | 1 | 1 | 1 | 1 | 0.6 | 0.87 | 0.71 | 0.92 | 0.64 | 0.94 | 0.96 |
| 3113: 406 | 425 | 1 | NA | 1 | 1 | 1 | 1 | 0.57 | 0.91 | 0.66 | 0.73 | 0.56 | 0.97 | 1 |

| | MVP | | | | |
|---|---|---|---|---|---|
| CpG | Position in | | | | |
| identifier | ROI | Brain | Brain | Brain | Brain |
| 3113: 42 | 61 | 1 | 0.5 | 0.85 | NA |
| 3113: 47 | 66 | 0.74 | 1 | 0.66 | NA |
| 3113: 72 | 91 | 0.87 | 0 | 0.75 | 0 |
| 3113: 78 | 97 | 0.86 | 1 | 0.85 | 1 |
| 3113: 86 | 105 | 0.93 | 1 | 1 | 1 |
| 3113: 116 | 135 | 0.74 | 0.87 | 0.6 | 1 |
| 3113: 156 | 175 | 0.95 | 1 | 1 | 1 |
| 3113: 160 | 179 | 1 | 0.83 | 1 | 1 |
| 3113: 164 | 183 | 0.92 | 0.89 | 0.43 | 1 |
| 3113: 182 | 201 | 0.87 | 1 | NA | 0.71 |
| 3113: 189 | 208 | 1 | 1 | 1 | 1 |
| 3113: 197 | 216 | 1 | 1 | 1 | 0.9 |
| 3113: 298 | 317 | 0.92 | NA | NA | NA |
| 3113: 303 | 322 | 0.89 | 0.91 | 0.76 | 0.94 |
| 3113: 378 | 397 | 0.22 | 0.43 | NA | 0.6 |
| 3113: 400 | 419 | 1 | 1 | 1 | 1 |
| 3113: 406 | 425 | 0.47 | 0.96 | 1 | 0.96 |

[0304] TABLE 14
(3127):

| | MVP | | | | | | | | | | | | |
|---|---|---|---|---|---|---|---|---|---|---|---|---|---|
| CpG | Position in | | | | | | | | | | | | |
| identifier | ROI | Prostate | Prostate | Prostate | Prostate | Prostate | Prostate | Prostate | Prostate | Muscle | Muscle | Muscle | Muscle |
| 3127: 25 | 1756 | NA | 0.93 | 0.86 | 1 | 0.61 | 0.44 | 0.57 | 1 | 0.88 | 0.78 | 0.82 | 0.93 |
| 3127: 28 | 1759 | 1 | 0.92 | 0.87 | 1 | NA | NA | 0.73 | 0.84 | 0.89 | 0.85 | 0.95 | 0.95 |
| 3127: 63 | 1794 | 0.8 | 0.62 | 0.77 | 0.7 | 0.17 | 0.57 | 0.47 | 0.46 | 0.79 | 0.53 | 0.54 | 0.71 |
| 3127: 73 | 1804 | 0.96 | 0.84 | 0.86 | 1 | 0.72 | 0.72 | 0.62 | 0.98 | 0.87 | 0.78 | 0.85 | 0.95 |
| 3127: 124 | 1855 | 0.94 | 1 | 0.86 | 0.79 | 0.79 | 0.63 | 0.6 | 0.88 | 0.74 | 0.83 | 0.77 | 0.86 |
| 3127: 127 | 1858 | 0.8 | 0.77 | 0.6 | 0.88 | 0.41 | 0.58 | 0.44 | 0.71 | 0.66 | 0.64 | 0.75 | 0.69 |
| 3127: 175 | 1906 | 0.65 | NA | 0.67 | 0.68 | NA | 0.5 | 0.34 | 0.85 | 0.81 | 0.69 | 0.72 | 0.83 |

| | MVP | | | | | | | | | | | | | | |
|---|---|---|---|---|---|---|---|---|---|---|---|---|---|---|---|
| CpG | Position in | Mus- | | | | | | | | | | | | | |
| identifier | ROI | cle | Lung | Lung | Lung | Lung | Lung | Liver | Liver | Breast | Breast | Breast | Breast | Breast | Breast |
| 3127: 25 | 1756 | 0.86 | 0.73 | 0.89 | 1 | 0.87 | NA | 0.76 | NA | 0.51 | 0.46 | 0.38 | 0.79 | 0.52 | 0.38 |
| 3127: 28 | 1759 | 0.82 | 0.86 | 0.91 | 1 | 0.87 | NA | 0.76 | NA | 0.71 | 0.7 | 0.61 | 1 | 0.65 | 0.63 |
| 3127: 63 | 1794 | 0.58 | 0.73 | 0.83 | 0.61 | 0.79 | 1 | 0.38 | 0.85 | 0.61 | 0.52 | 0.34 | 0.45 | 0.28 | 0.32 |
| 3127: 73 | 1804 | 0.86 | 0.89 | 0.96 | 0.56 | 0.94 | NA | 0.74 | 1 | 0.72 | 0.48 | 0.68 | 0.76 | 0.34 | 0.42 |
| 3127: 124 | 1855 | 0.8 | 0.8 | 0.99 | 0.67 | 0.68 | 0.68 | 0.71 | 0.59 | 0.57 | 0.61 | 0.63 | 0.71 | 0.6 | 0.67 |
| 3127: 127 | 1858 | 0.54 | 0.7 | 0.82 | 0.18 | 0.68 | 0.72 | 0.51 | 0.54 | 0.44 | 0.36 | 0.41 | 0.5 | 0.5 | 0.2 |
| 3127: 175 | 1906 | 0.81 | 0.69 | 0.94 | 0.54 | 0.65 | 0.66 | 0.59 | 0.53 | 0.42 | 0.38 | 0.49 | 0.78 | 0.58 | NA |

| | MVP | | | | | | |
|---|---|---|---|---|---|---|---|
| CpG | Position in | | | | | | |
| identifier | ROI | Brain | Brain | Brain | Brain | Brain | Brain |
| 3127: 25 | 1756 | 0.97 | 0.97 | 1 | 0.92 | 0.96 | 1 |
| 3127: 28 | 1759 | 0.95 | 0.92 | 1 | 0.89 | 0.91 | 0.99 |
| 3127: 63 | 1794 | 0.75 | 0.85 | 0.69 | 0.75 | 0.62 | 0.86 |
| 3127: 73 | 1804 | 1 | 0.99 | 1 | 0.92 | 0.83 | 0.87 |
| 3127: 124 | 1855 | 0.9 | 0.87 | 0.9 | 0.87 | 0.97 | 0.99 |
| 3127: 127 | 1858 | 0.82 | 0.82 | 0.33 | 0.81 | 0.65 | 0.9 |
| 3127: 175 | 1906 | 0.78 | 0.78 | NA | 0.8 | NA | 0.97 |

[0305] TABLE 15
(3129):

| | MVP | | | | | | | | | | | | |
|---|---|---|---|---|---|---|---|---|---|---|---|---|---|
| CpG | Position in | | | | | | | | | | | | |
| identifier | ROI | Prostate | Prostate | Prostate | Prostate | Prostate | Muscle | Muscle | Muscle | Muscle | Muscle | Lung | Lung |
| 3129: 99 | 1999 | 1 | 0.14 | 0.75 | 0.76 | NA | 0.77 | 0.7 | 0.16 | 0.71 | 0.55 | 1 | 0.44 |
| 3129: 111 | 2011 | 1 | 1 | 0.97 | 1 | NA | 1 | 1 | 0.97 | 1 | 1 | 1 | 1 |
| 3129: 125 | 2025 | 1 | 0.95 | 1 | 1 | NA | 1 | 1 | 1 | 1 | 1 | 1 | 1 |
| 3129: 137 | 2037 | 1 | 0.97 | 1 | 1 | NA | 1 | 1 | 1 | 0.95 | 0.95 | 1 | 1 |
| 3129: 139 | 2039 | 0.89 | 0.78 | 0.73 | 1 | NA | 1 | 1 | 1 | 1 | 0.64 | 0.76 | 1 |
| 3129: 144 | 2044 | 1 | 0.98 | 1 | 1 | NA | 0.79 | 0.92 | 1 | 0.92 | 0.57 | 1 | 1 |
| 3129: 148 | 2048 | 1 | 1 | 1 | 1 | NA | 1 | 1 | 1 | 1 | 0.85 | 1 | 1 |
| 3129: 157 | 2057 | 0.75 | 1 | 0.77 | 0.92 | NA | 0.69 | 1 | 0.77 | 1 | 1 | 0.8 | 1 |
| 3129: 162 | 2062 | 1 | 0.93 | 0.85 | 0.52 | NA | 1 | 1 | 0.95 | 0.56 | 0.88 | 1 | 0.84 |
| 3129: 178 | 2078 | 0.92 | 0.84 | 0.85 | 0.91 | NA | 0.83 | 1 | 0.88 | 1 | 0.72 | 0.9 | NA |
| 3129: 184 | 2084 | 0.86 | 0.9 | 0.73 | 0.93 | 1 | 1 | 0.96 | 1 | 0.83 | 0.92 | 1 | 0 |
| 3129: 216 | 2116 | 0.95 | 0.98 | 0.91 | 0.92 | NA | 1 | 1 | 1 | 0.86 | 1 | 0.83 | 1 |
| 3129: 261 | 2161 | 1 | 0.13 | 0.86 | 0.82 | 0.71 | 0.66 | 0.49 | 0.32 | 0.97 | 0.42 | 1 | 0.7 |
| 3129: 341 | 2241 | 0.94 | 1 | 1 | 1 | 1 | 1 | 0.79 | 0.93 | 1 | 1 | 1 | 0.93 |
| 3129: 353 | 2253 | 0.46 | 0.05 | 0.69 | 0.79 | NA | 0.034 | 0.92 | 0.16 | 0.77 | 0.29 | 1 | 0.97 |
| 3129: 357 | 2257 | 1 | 1 | 1 | 0.98 | 1 | 1 | 1 | 1 | 1 | 1 | 1 | 1 |
| 3129: 368 | 2268 | 0.83 | 0.86 | 1 | 0.91 | 0.45 | 0.57 | 0.9 | 0.08 | 0.63 | 0.59 | 1 | 0.96 |
| 3129: 371 | 2271 | 1 | 0.86 | 0.79 | 0.86 | 0.86 | 0.77 | 0.59 | 0.055 | 1 | 1 | 1 | 1 |
| 3129: 377 | 2277 | 1 | 1 | 1 | 1 | 0.77 | 0.92 | 0.82 | 1 | 1 | 0.78 | 1 | 1 |
| 3129: 384 | 2284 | 1 | 0.93 | 0.98 | 0.88 | 0.76 | 0.84 | 0.81 | 1 | 0.55 | 0.31 | 1 | 0.94 |
| 3129: 402 | 2302 | 1 | 1 | 1 | 0.92 | 1 | 0.97 | 1 | 1 | 0.89 | 1 | 1 | 0.91 |
| 3129: 438 | 2338 | NA | 0.77 | 0.57 | 1 | 0 | 1 | 1 | 0.64 | 0.87 | 0.8 | 1 | 1 |
| 3129: 453 | 2353 | 1 | 1 | 0.94 | 1 | NA | 1 | 1 | 0.86 | 1 | 0 | 0.97 | 1 |
| 3129: 475 | 2375 | 0.99 | 1 | 1 | 1 | 1 | 1 | 1 | 0.91 | 1 | 0.85 | 1 | NA |

| | MVP | | | | | | | | | | | | | | |
|---|---|---|---|---|---|---|---|---|---|---|---|---|---|---|---|
| CpG | Position in | | | | | | | | | | | | | | |
| identifier | ROI | Lung | Lung | Liver | Liver | Breast | Breast | Breast | Breast | Breast | Breast | Brain | Brain | Brain | Brain |
| 3129: 99 | 1999 | 0.79 | 1 | 1 | 0.64 | 0.74 | 0.52 | 1 | 0.65 | 1 | 1 | 1 | 0.85 | 0.68 | 0.27 |
| 3129: 111 | 2011 | 1 | 1 | 1 | 1 | 1 | 1 | 1 | 1 | 1 | 1 | 1 | 1 | 1 | 1 |
| 3129: 125 | 2025 | 1 | 1 | 1 | 1 | 1 | 1 | 1 | 1 | 1 | 0.92 | 1 | 1 | 1 | 1 |
| 3129: 137 | 2037 | 1 | 1 | 1 | 1 | 1 | 0.97 | 1 | 0.91 | 1 | 0.95 | 1 | 1 | 1 | 1 |
| 3129: 139 | 2039 | 1 | 0.95 | 1 | 1 | 0.8 | 1 | 1 | 0.82 | 1 | 0.5 | 0.79 | 1 | 0.73 | 1 |
| 3129: 144 | 2044 | 1 | 1 | 1 | 1 | 0.98 | 1 | 1 | 0.93 | 0.92 | 0.83 | 0.97 | 1 | 1 | 1 |
| 3129: 148 | 2048 | 1 | 1 | 1 | 1 | 1 | 1 | 1 | 1 | 1 | 1 | 1 | 1 | 1 | 1 |
| 3129: 157 | 2057 | 0.72 | 1 | 1 | 1 | 0.8 | 0.79 | 1 | 0.75 | 0.73 | 1 | 1 | 1 | 0.82 | 1 |
| 3129: 162 | 2062 | 0.87 | 0.65 | 0.89 | 1 | 0.92 | 1 | 1 | 1 | 1 | 0.78 | 1 | 1 | 0.86 | 0.65 |
| 3129: 178 | 2078 | 0.85 | 1 | 1 | 1 | 0.91 | 0.81 | 1 | 0.87 | 1 | 0.82 | 0.85 | 0.88 | 0.87 | 1 |
| 3129: 184 | 2084 | 0.89 | 1 | 1 | 1 | 0.89 | 0.95 | 1 | 0.97 | 0.87 | 1 | 0.87 | 0.86 | 0.9 | 0.97 |
| 3129: 216 | 2116 | 1 | 1 | 0.92 | 1 | 1 | 1 | 1 | 0.98 | 1 | 1 | 1 | 1 | 1 | 1 |
| 3129: 261 | 2161 | 0.89 | 1 | 0.066 | 0.48 | 0.74 | 0.66 | 0.74 | 0.91 | 0.59 | 0.99 | 0.78 | 0.74 | 0.94 | 1 |
| 3129: 341 | 2241 | 1 | 1 | 0.4 | 0.64 | 0.93 | 0.94 | 0.96 | 1 | 1 | 1 | 0.9 | 1 | 0.83 | 0.99 |
| 3129: 353 | 2253 | 1 | 0.96 | 0.27 | 0.36 | 0.63 | 0.58 | 0.61 | 0.9 | 0.67 | 0.93 | 0.78 | 0.8 | 0.86 | 0.94 |
| 3129: 357 | 2257 | 1 | 1 | 0.56 | 0.78 | 1 | 1 | 1 | 1 | 1 | 1 | 1 | 1 | 1 | 1 |
| 3129: 368 | 2268 | 0.9 | 0.98 | 0.064 | 0.34 | 0.68 | 0.6 | 0.53 | 0.57 | 0.54 | 0.82 | 0.86 | 0.97 | 0.82 | 0.95 |
| 3129: 371 | 2271 | 1 | 0.91 | 0.42 | 0.12 | 0.95 | 0.96 | 0.75 | 0.9 | 0.97 | 0.9 | 1 | 0.83 | 0.88 | 0.87 |
| 3129: 377 | 2277 | 1 | 1 | 0.24 | 0.4 | 1 | 1 | 0.92 | 1 | 1 | 0.78 | 0.91 | 1 | 1 | 1 |
| 3129: 384 | 2284 | 0.95 | 0.96 | 0.44 | 0.17 | 0.83 | 0.98 | 0.49 | 0.98 | 0.77 | 1 | 0.96 | 0.85 | 1 | 0.91 |
| 3129: 402 | 2302 | 1 | 0.93 | 0.49 | 0.31 | 0.85 | 0.93 | 0.62 | 0.93 | 0.9 | 1 | 0.97 | 0.97 | 1 | 0.99 |
| 3129: 438 | 2338 | 1 | 0.5 | 0.78 | 0.94 | 1 | 1 | 1 | 0.87 | 1 | 0.95 | 1 | 0.8 | 1 | 1 |
| 3129: 453 | 2353 | 0.93 | 1 | 1 | 1 | 0.83 | 0.98 | 0.93 | 1 | 1 | 0.93 | 0.96 | 0.73 | 1 | 1 |
| 3129: 475 | 2375 | 1 | 1 | 1 | 1 | 1 | 1 | 1 | 0.75 | 1 | 0.91 | 1 | 1 | 1 | 1 |

| | MVP | | |
|---|---|---|---|
| CpG | Position in | | |
| identifier | ROI | Brain | Brain |
| 3129: 99 | 1999 | 1 | 0.7 |
| 3129: 111 | 2011 | 1 | 1 |
| 3129: 125 | 2025 | 1 | 0.98 |
| 3129: 137 | 2037 | 1 | 0.89 |
| 3129: 139 | 2039 | 1 | 1 |
| 3129: 144 | 2044 | 1 | 1 |
| 3129: 148 | 2048 | 1 | 1 |
| 3129: 157 | 2057 | 1 | 0.78 |
| 3129: 162 | 2062 | 1 | 0.98 |
| 3129: 178 | 2078 | 0.84 | 0.64 |
| 3129: 184 | 2084 | 0.87 | 0.98 |
| 3129: 216 | 2116 | 1 | 1 |
| 3129: 261 | 2161 | 0.73 | 0.92 |
| 3129: 341 | 2241 | 1 | 0.92 |
| 3129: 353 | 2253 | 0.86 | 0.91 |
| 3129: 357 | 2257 | 1 | 0.93 |
| 3129: 368 | 2268 | 0.97 | 1 |
| 3129: 371 | 2271 | 0.79 | 0.85 |
| 3129: 377 | 2277 | 0.88 | 0.89 |
| 3129: 384 | 2284 | 0.91 | 1 |
| 3129: 402 | 2302 | 0.96 | 0.92 |
| 3129: 438 | 2338 | 1 | 1 |
| 3129: 453 | 2353 | 0.82 | 1 |
| 3129: 475 | 2375 | 1 | 1 |

[0306] TABLE 16
(3145):

| | MVP | | | | | | | | | | | | |
|---|---|---|---|---|---|---|---|---|---|---|---|---|---|
| CpG | Position in | | | | | | | | | | | | |
| identifier | ROI | Prostate | Muscle | Muscle | Muscle | Muscle | Muscle | Lung | Lung | Lung | Lung | Liver | Liver |
| 3145: 46 | 664 | 1 | 1 | 1 | 0.87 | 1 | 1 | 1 | 0.93 | 0.73 | 0.67 | 1 | 1 |
| 3145: 94 | 712 | 0.9 | 0.93 | 1 | 0.38 | 0.84 | 1 | 1 | 0.45 | 0.51 | 0.64 | 1 | 0.91 |
| 3145: 102 | 720 | 0.67 | 1 | 0.82 | 1 | 0.92 | 1 | 1 | 0.57 | 0.45 | 0.57 | 1 | 1 |
| 3145: 110 | 728 | 1 | 0.91 | 1 | 0.95 | 0.95 | 1 | 0.13 | 0.67 | 0.48 | 0.8 | 1 | 1 |
| 3145: 140 | 758 | 0.82 | 0.95 | 0.7 | 1 | 0.86 | 0.95 | 1 | 0.62 | 0.46 | 0.44 | 1 | 0.93 |
| 3145: 158 | 776 | 0.85 | 0.92 | 0.9 | 1 | 0.73 | 0.63 | 0.83 | 0.15 | 0.14 | 0.41 | 1 | 0.77 |
| 3145: 268 | 886 | 1 | 0.9 | 1 | 0.76 | 0.95 | 1 | 0.94 | 0.85 | 0.45 | 0.68 | 1 | 0.89 |
| 3145: 354 | 972 | 0.73 | 0.82 | 0.89 | 0.83 | 0.63 | 0.78 | 0.019 | 0.54 | 0.25 | 0.55 | 0.91 | 0.82 |
| 3145: 388 | 1006 | 1 | 1 | 1 | 1 | 1 | 1 | 1 | 0.73 | 0 | 0.4 | 1 | 1 |
| 3145: 445 | 1063 | 0.84 | 1 | 0.37 | NA | 0.68 | 0.9 | 0.83 | 0.37 | 0.28 | 0.69 | 0.92 | 0.94 |

| | MVP | | | | | | | | | | | |
|---|---|---|---|---|---|---|---|---|---|---|---|---|
| CpG | Position in | | | | | | | | | | | |
| identifier | ROI | Breast | Breast | Breast | Breast | Breast | Breast | Brain | Brain | Brain | Brain | Brain |
| 3145: 46 | 664 | 0.92 | 0.86 | 1 | 1 | 0.65 | 0.91 | 0.97 | 0.5 | 1 | 1 | 0.57 |
| 3145: 94 | 712 | 0.59 | 0.37 | 0.89 | 0.5 | 0.52 | 0.81 | 0.88 | 0.29 | 0.77 | 0.88 | 0.07 |
| 3145: 102 | 720 | 0.48 | 0.3 | 0.71 | 0.84 | 0.5 | 0.82 | 0.79 | 0.2 | 0.58 | 0.78 | 0.46 |
| 3145: 110 | 728 | 0.64 | 0.21 | 0.79 | 0.39 | 0.36 | 0.78 | 0.85 | 0.084 | 0.58 | 0.92 | 0.58 |
| 3145: 140 | 758 | 0.76 | 0.76 | 0.89 | 0.56 | 0.54 | 0.63 | 0.74 | 0.13 | 0.61 | 0.7 | 1 |
| 3145: 158 | 776 | 0.68 | 0.62 | 0.73 | 0.2 | 0.67 | 0.63 | 0.59 | 0 | 0.5 | 0.7 | 0.83 |
| 3145: 268 | 886 | 0.69 | 0.7 | 0.78 | 0.59 | 0.56 | 0.84 | 0.88 | 0.91 | 0.69 | 0.92 | 0.97 |
| 3145: 354 | 972 | 0.51 | 0.73 | 0.56 | 0.59 | 0.45 | 0.74 | 0.7 | 0.18 | 0.51 | 0.69 | NA |
| 3145: 388 | 1006 | 0.00049 | 0.014 | 0.016 | 0 | 0 | 0.42 | 0.0043 | 1 | 0.15 | 0.5 | NA |
| 3145: 445 | 1063 | 0.67 | 0.37 | 0.8 | 0.82 | 0.58 | 0.42 | 0.96 | 1 | 0.55 | 0.87 | NA |

[0307] TABLE 17
(3152):

| | MVP | | | | | | | | | | | | |
|---|---|---|---|---|---|---|---|---|---|---|---|---|---|
| CpG | Position in | | | | | | | | | | | | |
| identifier | ROI | Prostate | Prostate | Prostate | Prostate | Prostate | Prostate | Prostate | Prostate | Muscle | Muscle | Muscle | Muscle |
| 3152: 23 | 1818 | 4.3e−05 | 0.099 | 0.18 | 0 | 0 | 0.33 | NA | 0.15 | 0 | 0 | 0.23 | 0.059 |
| 3152: 56 | 1851 | 0.00013 | 0.34 | 0.19 | 0 | 0.026 | 0.56 | NA | 0.23 | 0.17 | 0.24 | 0.46 | 0.16 |
| 3152: 138 | 1933 | 0 | 0.07 | 0.0042 | 0.084 | 0 | 0.041 | NA | 0.087 | 0.25 | 0.18 | 0.087 | 0.05 |
| 3152: 234 | 2029 | 0.072 | 0.58 | 0.4 | 0 | 0 | 0.61 | 0.59 | 0.063 | 0.85 | 0.79 | 0.79 | 0.8 |
| 3152: 283 | 2078 | 0.0092 | 0.65 | 0.44 | 0.11 | 0 | 0.64 | 0.74 | 0 | 0.73 | 1 | 0.83 | 1 |
| 3152: 361 | 2156 | 0.17 | 0.67 | 0.28 | 0.33 | 0 | 0.4 | 1 | 0.84 | 0.67 | 1 | 0.87 | 0.69 |

| | MVP | | | | | | | | |
|---|---|---|---|---|---|---|---|---|---|
| CpG | Position in | | | | | | | | |
| identifier | ROI | Lung | Lung | Breast | Breast | Breast | Brain | Brain | Brain |
| 3152: 23 | 1818 | 0.0087 | 0.32 | NA | 0.76 | 0.31 | 0.34 | 0 | NA |
| 3152: 56 | 1851 | 0.00062 | 0.08 | NA | 0.49 | 0.29 | 1 | 0.35 | NA |
| 3152: 138 | 1933 | 0 | 0.19 | 0.71 | 0.079 | 0.037 | 0.19 | 0.047 | NA |
| 3152: 234 | 2029 | 0.089 | 0.25 | 0.73 | 0.91 | 0.67 | 1 | 0.68 | NA |
| 3152: 283 | 2078 | 0.012 | 0.22 | 0.49 | 0.92 | 0.84 | 1 | 0.77 | NA |
| 3152: 361 | 2156 | 0.69 | 0.19 | 1 | 0.86 | 0.72 | 1 | 0.6 | 1 |

[0308] TABLE 18
(3170):

| | MVP | | | | | | | | | | | | |
|---|---|---|---|---|---|---|---|---|---|---|---|---|---|
| CpG | Position in | | | | | | | | | | | | |
| identifier | ROI | Prostate | Prostate | Prostate | Prostate | Prostate | Prostate | Prostate | Muscle | Muscle | Muscle | Muscle | Muscle |
| 3170: 170 | 1858 | 0 | 0.54 | 0.55 | 0.78 | 0.93 | 0 | 0 | 0.4 | 0.37 | 0 | 0.39 | 0.57 |
| 3170: 175 | 1863 | 0 | 0.072 | 0.13 | 0.65 | NA | 0 | 0 | 0 | 0.22 | 0 | 0.022 | 0.093 |
| 3170: 353 | 2041 | 0.87 | 0.64 | 1 | 0.9 | NA | 0.97 | NA | 0.87 | NA | 1 | 0.62 | 0.95 |
| 3170: 385 | 2073 | NA | 0.43 | 0.58 | 0.69 | NA | NA | 1 | 0.51 | NA | NA | 0.34 | 0.61 |
| 3170: 396 | 2084 | NA | 0.67 | 0.7 | 0.86 | NA | NA | NA | 1 | NA | NA | 0.97 | 0.93 |
| 3170: 409 | 2097 | 0.57 | 0.49 | 0.79 | 0.82 | NA | 0.67 | NA | 1 | NA | 1 | 0.91 | 1 |
| 3170: 412 | 2100 | 0.64 | 0.66 | 0.97 | 0.81 | NA | 0.83 | NA | 0.94 | NA | 1 | 0.74 | 0.95 |

| | MVP | | | | | | | | | | | | | | |
|---|---|---|---|---|---|---|---|---|---|---|---|---|---|---|---|
| CpG | Position in | | | | | | | | | | | | | | |
| identifier | ROI | Lung | Lung | Lung | Lung | Lung | Liver | Liver | Breast | Breast | Breast | Breast | Breast | Breast | Brain |
| 3170: 170 | 1858 | 0.84 | 0.42 | 0.51 | 0.22 | 0 | 0.62 | 0.86 | 0.53 | NA | 0 | 0.061 | 0.49 | 0.97 | 1 |
| 3170: 175 | 1863 | 0.15 | 0.052 | 0.23 | 0.013 | 0 | 0.33 | 0.49 | 0.21 | 0 | 0 | 0.12 | 0.29 | 0 | 0.6 |
| 3170: 353 | 2041 | 1 | NA | 0.28 | 0.21 | 0.55 | 0.89 | 0.88 | 0.71 | 1 | 0.87 | 0.87 | 0.78 | 1 | 0.87 |
| 3170: 385 | 2073 | NA | 0 | 0.35 | 0.2 | NA | 0.7 | 0.87 | 0.55 | NA | 1 | NA | 0.51 | NA | 0.69 |
| 3170: 396 | 2084 | NA | 0.023 | 0.37 | 0.36 | NA | 0.91 | 0.97 | 0.86 | NA | NA | NA | 0.74 | NA | 0.88 |
| 3170: 409 | 2097 | 0.88 | 0.32 | 0.36 | 0.16 | 0.41 | 0.67 | 0.88 | 0.81 | 1 | 0.52 | 0.35 | 0.72 | 1 | 0.88 |
| 3170: 412 | 2100 | 1 | 0.42 | 0.2 | 0.22 | 0.42 | 0.68 | 0.74 | 0.67 | 1 | 0.62 | 0.7 | 0.76 | 1 | 0.75 |

| | MVP | | | | | |
|---|---|---|---|---|---|---|
| CpG | Position in | | | | | |
| identifier | ROI | Brain | Brain | Brain | Brain | Brain |
| 3170: 170 | 1858 | 0 | 0 | 1 | 0.81 | 0.82 |
| 3170: 175 | 1863 | 0.013 | 0 | 0.63 | 0.91 | 0.48 |
| 3170: 353 | 2041 | NA | 1 | 1 | 1 | 0.94 |
| 3170: 385 | 2073 | NA | NA | 0.67 | 0.72 | 0.63 |
| 3170: 396 | 2084 | NA | NA | 0.67 | 1 | 1 |
| 3170: 409 | 2097 | NA | 0.54 | 0.95 | 0.83 | 0.93 |
| 3170: 412 | 2100 | NA | 1 | 0.81 | 0.98 | 0.74 |

[0309] TABLE 19
(3192):

| | MVP | | | | | | | | | | | | |
|---|---|---|---|---|---|---|---|---|---|---|---|---|---|
| CpG | Position in | | | | | | | | | | | | |
| identifier | ROI | Prostate | Prostate | Prostate | Prostate | Prostate | Prostate | Prostate | Prostate | Muscle | Muscle | Muscle | Muscle |
| 3192: 29 | 375 | 0.13 | 0.49 | 0.19 | 0.12 | 0.2 | 0 | 0.1 | 0 | 0.28 | 0.38 | 0 | 0 |
| 3192: 108 | 454 | 0.49 | 0.47 | 0.41 | 0.35 | 0.38 | 0.5 | 0.32 | 0.15 | 0.47 | 0.38 | 0 | 0.099 |
| 3192: 128 | 474 | 0.48 | 0.35 | 0.37 | 0.3 | 0.33 | 0.33 | 0.34 | 0.18 | 0.52 | 0.082 | 0 | 0.2 |
| 3192: 160 | 506 | 0.59 | 0.52 | 0.49 | 0.37 | 0.38 | 0.45 | 0.33 | 0.32 | 0.58 | 0.14 | 0.27 | 0.15 |
| 3192: 166 | 512 | 0.5 | 0.44 | 0.41 | 0.26 | 0.41 | 0.32 | 0.31 | 0.17 | 0.4 | 0.079 | 0.44 | 0.048 |
| 3192: 172 | 518 | 0.29 | 0.18 | 0.18 | 0.077 | 0.086 | 0.048 | 0.17 | 0.075 | 0.12 | 0.11 | 0.097 | 0 |
| 3192: 191 | 537 | 0.59 | 0.48 | 0.43 | 0.33 | 0.36 | 0.15 | 0.53 | 0.25 | 0.54 | 0.1 | 0.3 | 0.46 |
| 3192: 265 | 611 | 0.54 | 0.54 | 0.49 | 0.37 | 0.49 | 0.44 | 0.43 | 0.31 | 0.85 | 0.76 | 0.69 | 0.31 |
| 3192: 268 | 614 | 0.69 | 0.64 | 0.66 | 0.5 | 0.64 | 0.57 | 0.51 | 0.8 | 0.68 | 0.84 | 0.34 | 0.38 |
| 3192: 362 | 708 | 0.63 | 0.66 | 0.56 | 0.5 | 0.73 | 0.55 | 0.57 | 0.62 | 0.76 | 0.76 | 0.82 | 0.47 |
| 3192: 368 | 714 | 0.64 | 0.64 | 0.58 | 0.69 | 0.66 | 0.64 | 0.52 | 0.44 | 0.74 | 0.44 | 0.34 | 0.52 |
| 3192: 427 | 773 | 0.68 | 0.41 | 0.35 | 0.87 | 0.51 | 0.4 | 0.41 | 0.12 | 0.78 | 0.54 | 0.43 | 0.42 |

| | MVP | | | | | | | | | | | | | | |
|---|---|---|---|---|---|---|---|---|---|---|---|---|---|---|---|
| CpG | Position in | Mus- | | | | | | | | | | | | | |
| identifier | ROI | cle | Lung | Lung | Lung | Lung | Lung | Liver | Liver | Breast | Breast | Breast | Breast | Breast | Breast |
| 3192: 29 | 375 | 0.19 | 1 | 1 | 0.72 | 1 | 0 | NA | NA | 0 | 0.12 | 0.32 | 0.26 | 0 | 0.37 |
| 3192: 108 | 454 | 0.34 | 0.69 | 1 | 1 | 0.87 | 0.63 | 0.62 | 0.29 | 0.43 | 0.51 | 0.32 | 0.57 | 0.13 | 0.58 |
| 3192: 128 | 474 | 0.38 | 0.58 | 1 | 1 | 0.64 | 0.6 | NA | 0.33 | 0.37 | 0.62 | 0.36 | 0.32 | 0.47 | 0.37 |
| 3192: 160 | 506 | 0.47 | 0.64 | 0.81 | 0.54 | 0.73 | 0.69 | 0.41 | 0.26 | 0.38 | 0.34 | 0.34 | 0.43 | 0.49 | 0.55 |
| 3192: 166 | 512 | 0.32 | 0.58 | 0.91 | 0.59 | 0.54 | 0.69 | 0.38 | 0.26 | 0.41 | 0.33 | 0.29 | 0 | 0 | 0.39 |
| 3192: 172 | 518 | 0.064 | 0.53 | 0.68 | 0.44 | 0.45 | 0.35 | 0.38 | 0.1 | 0.17 | 0.22 | 0.11 | 0 | 0 | 0.034 |
| 3192: 191 | 537 | 0.52 | 0.64 | 0.84 | 0.67 | 0.7 | 0.67 | 0.68 | 0.28 | 0.44 | 0.46 | 0.45 | 0.44 | 0.52 | 0.56 |
| 3192: 265 | 611 | 0.67 | 0.77 | 1 | 0.92 | 1 | 0.88 | 1 | 0.5 | 0.54 | 0.76 | 0.6 | 0.72 | 0.67 | 0.59 |
| 3192: 268 | 614 | 0.75 | 0.76 | 0.95 | 0.87 | 0.91 | 0.8 | 1 | 0.42 | 0.64 | 0.84 | 0.7 | 0.78 | 0.59 | 0.81 |
| 3192: 362 | 708 | 0.62 | 0.88 | 0.97 | 1 | 0.94 | 0.8 | 0.83 | 0.78 | 0.67 | 0.63 | 0.72 | 0.84 | 0.54 | 0.76 |
| 3192: 368 | 714 | 0.69 | 0.76 | 0.91 | 0.87 | 0.93 | 0.76 | 0.93 | 0.63 | 0.61 | 0.55 | 0.61 | 0.77 | 0.56 | 0.61 |
| 3192: 427 | 773 | 0.55 | 0.7 | 0.71 | 0.51 | 0.85 | 0.76 | 1 | 0.73 | 0.64 | 0.51 | 0.55 | 0.47 | 0.83 | 0.77 |

| | MVP | | | | | | |
|---|---|---|---|---|---|---|---|
| CpG | Position in | | | | | | |
| identifier | ROI | Brain | Brain | Brain | Brain | Brain | Brain |
| 3192: 29 | 375 | 0.25 | 0 | 0.085 | 0.46 | NA | 0.38 |
| 3192: 108 | 454 | 0.46 | 0.39 | 1 | 1 | 0.36 | 0.5 |
| 3192: 128 | 474 | 0.38 | 0.41 | 0.93 | 0.61 | 0.38 | 0.36 |
| 3192: 160 | 506 | 0.39 | 0.33 | 0.97 | 0.65 | 0.27 | 0.46 |
| 3192: 166 | 512 | 0.3 | 0.35 | 1 | 0.43 | 0.3 | 0.23 |
| 3192: 172 | 518 | 0.13 | 0 | 0 | 0.14 | 0.12 | 0.051 |
| 3192: 191 | 537 | 0.46 | 0.4 | 0.96 | 0.68 | 0.31 | 0.5 |
| 3192: 265 | 611 | 0.56 | 0.56 | 0.96 | 0.94 | 0.63 | 0.57 |
| 3192: 268 | 614 | 0.68 | 0.66 | 1 | 0.86 | 0.57 | 0.62 |
| 3192: 362 | 708 | 0.75 | 0.82 | 0.87 | 1 | 0.74 | 0.62 |
| 3192: 368 | 714 | 0.65 | 0.7 | 0.83 | 1 | 0.61 | 0.75 |
| 3192: 427 | 773 | 0.33 | 0.51 | 1 | 0.67 | 0.47 | 0.51 |

[0310] TABLE 20
(3200):

| | MVP | | | | | | | | | | | | |
|---|---|---|---|---|---|---|---|---|---|---|---|---|---|
| CpG | Position in | | | | | | | | | | | | |
| identifier | ROI | Prostate | Prostate | Prostate | Prostate | Prostate | Prostate | Prostate | Prostate | Muscle | Muscle | Muscle | Muscle |
| 3200: 36 | 1897 | 0.46 | 0.48 | 0.39 | 0.35 | 0.47 | 0 | 1 | 0.32 | 0.54 | 0.33 | 0.31 | 0.71 |
| 3200: 49 | 1910 | 0.65 | 0.39 | 0.27 | 0.42 | 0.28 | 0 | 0.48 | 0.43 | 0.93 | 0.91 | 1 | 0.93 |
| 3200: 66 | 1927 | 0.11 | 0.15 | 0.084 | 0.083 | 0.16 | 0 | 0 | 0.078 | 0.28 | 0.14 | 0.25 | 0.23 |
| 3200: 78 | 1939 | 0.057 | 0.46 | 0.36 | 0.48 | 0.6 | 0.7 | 0.53 | 0.26 | 0.51 | 0.6 | 0.68 | 0.75 |
| 3200: 83 | 1944 | 0.11 | 0.25 | 0 | 0.068 | 0.092 | 0.11 | 0.28 | 0.15 | 0.13 | 0.1 | 0.34 | 0.37 |
| 3200: 99 | 1960 | 0.39 | 0.34 | 0.52 | 0.25 | 0.32 | 0.29 | 0.35 | 0.27 | 0.53 | 0.46 | 0.58 | 0.56 |
| 3200: 127 | 1988 | 0.29 | 0.3 | 0.24 | 0.2 | 0.19 | 0.41 | 0.31 | 0.19 | 0.37 | 0.2 | 0.21 | 0.28 |
| 3200: 155 | 2016 | 0.49 | 0.46 | 0.42 | 0.39 | 0.45 | 0.62 | 0.57 | 0.63 | 0.87 | 0.56 | 0.7 | 0.85 |
| 3200: 160 | 2021 | 0.3 | 0.4 | 0.26 | 0.22 | 0.23 | 0.39 | 0.47 | 0.27 | 0.54 | 0.34 | 0.64 | 0.53 |
| 3200: 169 | 2030 | 0.5 | 0.47 | 0.29 | 0.42 | 0.36 | 0.39 | 0.49 | 0.36 | 0.74 | 0.83 | 0.92 | 0.59 |
| 3200: 178 | 2039 | 0.54 | 0.61 | 0.39 | 0.29 | 0.32 | 0.44 | 0.55 | 0.4 | 0.54 | 0.54 | 0.41 | 0.64 |
| 3200: 192 | 2053 | 0.74 | 0.92 | 0.64 | 0.49 | 0.71 | 0.84 | 0.86 | 0.7 | 1 | 1 | 0.97 | 0.88 |
| 3200: 199 | 2060 | 0.3 | 0.44 | 0.37 | 0.23 | 0.42 | 0.42 | 0.5 | 0.18 | 0.36 | 0.13 | 0.61 | 0.51 |
| 3200: 225 | 2086 | 0.45 | 0.68 | 0.39 | 0.48 | 0.55 | 0.48 | 0.66 | 0.59 | 0.78 | 0.56 | 0.66 | 0.71 |
| 3200: 305 | 2166 | 0.53 | 0.5 | 0.3 | 0.3 | 0.45 | 0.63 | 0.74 | 0.39 | 0.47 | 0.51 | 0.41 | 0.52 |
| 3200: 312 | 2173 | 0.44 | 0.53 | 0.24 | 0.36 | 0.53 | 0.38 | 0.41 | 0.16 | 0.51 | 0.4 | 0.6 | 0.58 |
| 3200: 361 | 2222 | 0.6 | 0.96 | 0.79 | 0.41 | 0.52 | 0.64 | 0.83 | 0.73 | 0.92 | 0.94 | 0.67 | 0.52 |

| | MVP | | | | | | | | | | | | | | |
|---|---|---|---|---|---|---|---|---|---|---|---|---|---|---|---|
| CpG | Position in | Mus- | | | | | | | | | | | | | |
| identifier | ROI | cle | Lung | Lung | Lung | Lung | Lung | Liver | Liver | Breast | Breast | Breast | Breast | Breast | Breast |
| 3200: 36 | 1897 | 1 | 0.39 | 0.33 | 0.63 | 0.77 | 0.26 | 1 | 0.91 | 0.68 | 0.84 | 0.37 | 0.51 | 0.67 | 0.44 |
| 3200: 49 | 1910 | 0.76 | 0.45 | 0.46 | NA | 0.52 | 0.29 | 0.87 | 0.81 | 0.71 | 0.86 | 0.49 | 0.62 | 0.9 | 0.57 |
| 3200: 66 | 1927 | 0.2 | 0.17 | 0.26 | NA | 0.35 | 0.12 | 0.91 | 0.55 | 0.18 | 0.34 | 0.093 | 0.37 | 0.064 | 0.19 |
| 3200: 78 | 1939 | 0.45 | 0.52 | 0.46 | 0.46 | 0.54 | 0.49 | 0.96 | 0.83 | 0.79 | 0.5 | 0.41 | 0.77 | 0.62 | 0.51 |
| 3200: 83 | 1944 | 0.18 | 0.2 | 0.35 | 0.25 | 0.26 | 0.12 | 0.56 | 0.75 | 0.49 | 0.35 | 0.22 | 0.56 | 0.082 | 0.082 |
| 3200: 99 | 1960 | 0.52 | 0.24 | 0.3 | 0.44 | 0.45 | NA | 0.96 | 0.39 | 0.2 | 0.48 | 0.5 | 0.66 | 0.43 | 0.29 |
| 3200: 127 | 1988 | 0.22 | 0.32 | 0.69 | 0.12 | 0.39 | 0.29 | 0.93 | 0.67 | 0.44 | 0.28 | 0.37 | 0.34 | 0.31 | 0.41 |
| 3200: 155 | 2016 | 0.62 | 0.43 | 0.75 | 0.71 | 0.65 | 0.35 | 0.85 | 0.65 | 0.58 | 0.74 | 0.86 | 0.79 | 0.86 | 0.55 |
| 3200: 160 | 2021 | 0.35 | 0.15 | 0.62 | 0.28 | 0.5 | 0.51 | 1 | 0.86 | 0.53 | 0.36 | 0.47 | 0.79 | 0.89 | 0.39 |
| 3200: 169 | 2030 | 0.5 | 0.27 | 0.59 | 0.57 | 0.58 | 0.65 | 1 | 0.84 | 0.66 | 0.51 | 0.54 | 0.81 | 0.66 | 0.36 |
| 3200: 178 | 2039 | 0.53 | 0.3 | 0.61 | 0.28 | 0.46 | 0.49 | 0.9 | 0.91 | 0.66 | 0.57 | 0.65 | 0.71 | 0.41 | 0.38 |
| 3200: 192 | 2053 | 0.94 | 0.51 | 0.84 | 0.82 | 0.78 | 0.61 | 1 | 0.91 | 0.97 | 0.87 | 0.82 | 0.89 | 1 | 0.77 |
| 3200: 199 | 2060 | 0.36 | 0.45 | 0.44 | 0.34 | 0.47 | 0.28 | 0.88 | 0.83 | 0.65 | 0.86 | 0.71 | 0.77 | 0.76 | 0.33 |
| 3200: 225 | 2086 | 0.8 | 0.42 | 0.65 | 0.53 | 0.63 | 0.38 | 1 | 0.87 | 0.78 | 0.47 | 0.7 | 0.95 | 0.84 | 0.66 |
| 3200: 305 | 2166 | 0.31 | 0.45 | 0.8 | 0.63 | 0.5 | 0.63 | 1 | 1 | 0.7 | 0.55 | 0.29 | 0.43 | 0.46 | 0.3 |
| 3200: 312 | 2173 | 0.38 | 0.42 | 0.65 | 0.14 | 0.7 | 0.36 | 1 | 0.93 | 0.55 | 0.44 | 0.49 | 0.3 | 0.71 | 0.29 |
| 3200: 361 | 2222 | 0.4 | 0.5 | 0.61 | 0.64 | 0.59 | 0.69 | 1 | 0.91 | 1 | 0.73 | 0.63 | 0.9 | 0.79 | 0.85 |

| | MVP | | | | | |
|---|---|---|---|---|---|---|
| CpG | Position in | | | | | |
| identifier | ROI | Brain | Brain | Brain | Brain | Brain |
| 3200: 36 | 1897 | 1 | 0.36 | 0.45 | 0.63 | 0.23 |
| 3200: 49 | 1910 | 0.54 | 0.72 | 0.69 | 0.62 | 0.42 |
| 3200: 66 | 1927 | 0.28 | 0.37 | 0.58 | 0.23 | 0.18 |
| 3200: 78 | 1939 | 0.66 | 0.5 | 0.6 | 0.57 | 0.35 |
| 3200: 83 | 1944 | 0.2 | 0.42 | 0.45 | 0.088 | 0.2 |
| 3200: 99 | 1960 | 0.66 | 0.5 | 0.69 | 0.4 | 0.51 |
| 3200: 127 | 1988 | 0.35 | 0.36 | 0.48 | 0.41 | 0.53 |
| 3200: 155 | 2016 | 0.67 | 0.73 | NA | 0.56 | 0.41 |
| 3200: 160 | 2021 | 0.59 | 0.55 | 0.57 | 0.44 | 0.52 |
| 3200: 169 | 2030 | 0.81 | 0.64 | 0.63 | 0.68 | 0.57 |
| 3200: 178 | 2039 | 0.77 | 0.53 | 0.57 | 0.42 | 0.46 |
| 3200: 192 | 2053 | 0.91 | 1 | 0.95 | 0.85 | 0.89 |
| 3200: 199 | 2060 | 0.49 | 0.37 | 0.53 | 0.31 | 0.43 |
| 3200: 225 | 2086 | 0.86 | 0.73 | 0.82 | 0.66 | 0.66 |
| 3200: 305 | 2166 | 0.75 | 0.46 | 0.56 | 0.53 | 0.53 |
| 3200: 312 | 2173 | 0.73 | 0.4 | 0.39 | 0.45 | 0.53 |
| 3200: 361 | 2222 | 0.48 | 0.91 | 0.94 | 0.45 | 0.75 |

[0311] TABLE 21
(3208):

| | MVP Position in | | | | | | | | | | | | |
|---|---|---|---|---|---|---|---|---|---|---|---|---|---|
| CpG identifier | ROI | Prostate | Prostate | Prostate | Prostate | Prostate | Prostate | Prostate | Prostate | Muscle | Muscle | Muscle | Muscle |
| 3208: 33 | 729 | 0 | NA | 0 | 0 | 0.066 | 0.42 | 0.25 | 0 | 0 | 0.05 | 0 | NA |
| 3208: 45 | 741 | 0.5 | 0.81 | 0.5 | 0.67 | 0.58 | 0 | 0.39 | NA | 0.34 | 0.2 | 0 | 0.52 |
| 3208: 69 | 765 | 0.51 | 0.77 | 0.6 | 0.53 | 0.52 | 1 | 0.36 | 0.37 | 0.58 | 0.15 | 0.43 | NA |
| 3208: 111 | 807 | 0.51 | 0.7 | 0.42 | 0.33 | 0.64 | NA | 0.4 | 0.42 | 0.16 | 0.098 | 0.27 | NA |
| 3208: 119 | 815 | 0.54 | 0.8 | 0.65 | 0.23 | 0.56 | 0.54 | 0.61 | 0.37 | 0.55 | 0.16 | 0.4 | 0.6 |
| 3208: 127 | 823 | 0.29 | 0.81 | 0.54 | 0.44 | 0.45 | 0.71 | 0.46 | 0.3 | 0.3 | 0.15 | 0 | 0.19 |
| 3208: 148 | 844 | 0.69 | 0.86 | 0.66 | 0.59 | 0.64 | 0.76 | 0.64 | 0.59 | 1 | 0.28 | 0.52 | 0.87 |
| 3208: 164 | 860 | 0.57 | 0.86 | 0.52 | 0.7 | 0.62 | 0.55 | 0.63 | 0.5 | 0.58 | 0.71 | 0 | 0.5 |
| 3208: 303 | 999 | 0.69 | 0.93 | 0.8 | 0.83 | 0.35 | 0.5 | 0.81 | 0.34 | 0.26 | 0.18 | 0.71 | 0.56 |
| 3208: 338 | 1034 | 0.83 | 1 | 0.85 | 0.84 | 0.93 | 0.88 | 1 | 0.81 | 0.54 | 0.5 | 0.46 | 0.81 |
| 3208: 349 | 1045 | 0.75 | 0.93 | 0.8 | 0.84 | 0.34 | 0.75 | 0.71 | 0.48 | 0.36 | 0.22 | 0.37 | 0.12 |
| 3208: 371 | 1067 | 1 | 1 | 1 | 0.96 | 1 | 1 | 1 | 1 | 0.97 | 1 | 0.87 | 0.98 |
| 3208: 392 | 1088 | 1 | 1 | 1 | 1 | 1 | 1 | 1 | 1 | 0.84 | 0.78 | 0.72 | 0.54 |
| 3208: 403 | 1099 | 1 | 1 | 1 | 1 | 1 | 1 | 1 | 1 | 1 | 1 | 1 | 1 |
| 3208: 436 | 1132 | 1 | 0.88 | 1 | 0.97 | 0.5 | 1 | 0.7 | NA | 1 | 1 | 1 | 1 |
| 3208: 455 | 1151 | NA | 1 | NA | 1 | NA | 1 | NA | 1 | 1 | 1 | 1 | NA |
| 3208: 461 | 1157 | NA | 1 | 1 | 1 | 0 | 1 | NA | 1 | 0.73 | 1 | 1 | NA |

| | MVP | | | | | | | | | | | | | | |
|---|---|---|---|---|---|---|---|---|---|---|---|---|---|---|---|
| CpG identifier | Position in ROI | Muscle | Lung | Lung | Lung | Lung | Lung | Liver | Liver | Breast | Breast | Breast | Breast | Breast | Breast |
| 3208: 33 | 729 | 0 | 0.36 | 0.64 | 0.011 | 0.32 | 0 | 0.7 | 0.64 | NA | 0 | 0 | 0.91 | 0.079 | 0.15 |
| 3208: 45 | 741 | 0.56 | 0.62 | 0.86 | 0.53 | 0.76 | 0.55 | 1 | 1 | 0.59 | 0.15 | 0.63 | 0.96 | 0.5 | 0.67 |
| 3208: 69 | 765 | 0.4 | 0.66 | 0.95 | 0.49 | 0.49 | 0.27 | 1 | 1 | 0.6 | 0.47 | 0.34 | 1 | 0.36 | 0.63 |
| 3208: 111 | 807 | 0 | 0.16 | NA | 0.074 | 1 | 0.62 | 0.63 | 1 | 0.65 | 0.14 | 0.35 | 1 | 0.49 | 0.47 |
| 3208: 119 | 815 | 0.62 | 0.27 | 0.59 | 0 | 0.5 | 0.34 | 0.89 | 1 | 0.58 | 0.21 | 0.35 | 0.48 | 0.26 | 0.66 |
| 3208: 127 | 823 | 0.3 | 0.55 | 0.71 | 0.13 | 0.66 | 0.44 | 0.89 | 0.85 | 0.47 | 0.23 | 0.6 | 0.63 | 0.43 | 0.7 |
| 3208: 148 | 844 | 0.8 | 0.73 | 0.84 | 0.52 | 0.8 | 0.84 | 0.96 | 1 | 0.78 | 0.53 | 0.7 | 1 | 0.84 | 0.78 |
| 3208: 164 | 860 | 0.48 | 0.5 | 0.58 | 0.51 | 0.82 | 0.29 | 1 | 0.89 | 0.83 | 0.64 | 0.71 | 0.86 | 0.56 | 0.62 |
| 3208: 303 | 999 | 0.52 | 0.81 | 1 | 0.98 | 0.91 | 0.7 | 1 | 1 | 0.75 | 0.85 | 0.69 | 0.94 | 0.59 | 0.76 |
| 3208: 338 | 1034 | 0.5 | 0.84 | NA | 0.33 | 0.9 | 1 | 0.92 | 0.86 | 0.59 | 0.89 | 0.65 | 0.94 | 0.76 | 0.86 |
| 3208: 349 | 1045 | 0.45 | 0.81 | 1 | 0.069 | 0.72 | 0.81 | 1 | 0.84 | 0.62 | 0.33 | 0.45 | 0.95 | 0.71 | 0.77 |
| 3208: 371 | 1067 | 0.88 | 1 | NA | 0.56 | 0.95 | 1 | 1 | 1 | 1 | 1 | 0.94 | 1 | 0.9 | 0.96 |
| 3208: 392 | 1088 | 1 | 0.89 | 1 | 1 | 0.95 | 0.78 | 0.76 | 1 | 1 | 1 | 1 | 1 | 1 | 1 |
| 3208: 403 | 1099 | 1 | 1 | NA | 0.66 | 1 | 1 | 1 | 1 | 1 | 1 | 1 | 1 | 0.94 | 1 |
| 3208: 436 | 1132 | 0.86 | 1 | 1 | 1 | 1 | 0.91 | 1 | 1 | 1 | 1 | 0.92 | 0.87 | 0.88 | 1 |
| 3208: 455 | 1151 | NA | 1 | NA | 1 | NA | 1 | NA | 1 | NA | 1 | NA | 1 | 1 | NA |
| 3208: 461 | 1157 | NA | 1 | NA | 1 | NA | 0.55 | NA | 1 | NA | 0.24 | NA | 1 | 1 | NA |

| CpG identifier | MVP Position in ROI | Brain | Brain | Brain | Brain | Brain | Brain |
|---|---|---|---|---|---|---|---|
| 3208: 33 | 729 | 0.12 | 0.2 | 0.5 | 0.23 | 0.034 | 0 |
| 3208: 45 | 741 | 0.65 | 0.65 | 0.24 | 0.27 | 0 | 0.054 |
| 3208: 69 | 765 | 0.38 | 0.53 | 1 | 0.3 | 0.52 | 1 |
| 3208: 111 | 807 | 0 | 0 | 0.12 | 0.5 | 0.28 | 0.85 |
| 3208: 119 | 815 | 0.66 | 0.71 | 0 | NA | 0.63 | 0.48 |
| 3208: 127 | 823 | 0.49 | 0.43 | 0.16 | 0.48 | 0.62 | 0.67 |
| 3208: 148 | 844 | 0.9 | 0.91 | 0.14 | 0.82 | 0.88 | 0.85 |
| 3208: 164 | 860 | 0.67 | 0.58 | 1 | 0.84 | 0.73 | 0.69 |
| 3208: 303 | 999 | 0.94 | 0.99 | 1 | 0.91 | 0.83 | 0.77 |
| 3208: 338 | 1034 | 0.72 | 0.75 | 0.94 | 1 | 0.8 | 0.71 |
| 3208: 349 | 1045 | 1 | 0.85 | 0.76 | 0.65 | 0.91 | 0.87 |
| 3208: 371 | 1067 | 1 | 1 | 1 | 1 | 1 | 1 |
| 3208: 392 | 1088 | 1 | 1 | 0.94 | 1 | 1 | 1 |
| 3208: 403 | 1099 | 1 | 1 | 0.97 | 1 | 1 | 1 |
| 3208: 436 | 1132 | 1 | 1 | 1 | 1 | 0.7 | 1 |
| 3208: 455 | 1151 | NA | NA | 0 | 1 | NA | NA |
| 3208: 461 | 1157 | NA | NA | 1 | 1 | NA | NA |

[0312] TABLE 22
(3239):

| | MVP Position in | | | | | | | | | | | | |
|---|---|---|---|---|---|---|---|---|---|---|---|---|---|
| CpG identifier | ROI | Prostate | Prostate | Prostate | Prostate | Prostate | Prostate | Prostate | Prostate | Muscle | Muscle | Muscle | Muscle |
| 3239: 38 | 623 | 0.9 | 0.76 | 0.82 | 0.73 | 0.73 | 0.96 | 0.76 | 0.89 | 0.91 | 1 | 0.88 | 0.89 |
| 3239: 44 | 629 | 0.99 | 0.98 | 1 | 0.95 | 0.95 | 1 | 0.96 | 0.97 | 1 | 0.43 | 1 | 1 |
| 3239: 49 | 634 | 0.34 | 0.49 | 0.4 | 0.4 | 0.15 | 0.051 | 0.45 | 0.28 | 0.36 | 0.37 | 0.69 | 0.45 |
| 3239: 71 | 656 | 0.59 | 0.59 | 0.65 | 0.56 | 0.59 | 0.54 | 0.51 | 0.55 | 0.59 | 0.46 | 0.55 | 0.62 |
| 3239: 75 | 660 | 0.24 | 0.18 | 0.23 | 0.17 | 0.27 | 0.3 | 0.11 | 0.12 | 0.09 | 0 | 0.27 | 0.28 |
| 3239: 88 | 673 | 0.37 | 0.42 | 0.35 | 0.2 | 0.091 | 0.09 | 0.088 | 0.11 | 0.075 | 0.0093 | 0 | 0.063 |
| 3239: 141 | 726 | 0.43 | 0.49 | 0.41 | 0.29 | 0.42 | 0.63 | 0.24 | 0.33 | 0.39 | 0.099 | 0.23 | 0.47 |
| 3239: 163 | 748 | 0.12 | 0.25 | 0.13 | 0.28 | 0.16 | 0.25 | 0.032 | 0.22 | 0.18 | 0 | 0.23 | 0.14 |
| 3239: 169 | 754 | 0.42 | 0.57 | 0.55 | 0.5 | 0.36 | 0.26 | 0.45 | 0.49 | 0.58 | 0.48 | 0.18 | 0.73 |
| 3239: 178 | 763 | 0.58 | 0.54 | 0.64 | 0.5 | 0.49 | 0.78 | 0.43 | 0.58 | 0.76 | 0.31 | 0.63 | 0.8 |
| 3239: 197 | 782 | 0.63 | 0.61 | 0.3 | 0.4 | 0.44 | 0.85 | 0.26 | 0.52 | 0.67 | 0.2 | 0.24 | 0.73 |
| 3239: 212 | 797 | 0.59 | 0.63 | 0.58 | 0.52 | 0.5 | 0.5 | 0.5 | 0.6 | 0.75 | 0.24 | 0.27 | 0.74 |
| 3239: 218 | 803 | 0.43 | 0.52 | 0.52 | 0.41 | 0.38 | 0.33 | 0.37 | 0.46 | 0.41 | 0.16 | 0 | 0.37 |
| 3239: 233 | 818 | 0.41 | 0.69 | 0.59 | 0.48 | 0.3 | 0.42 | 0.33 | 0.54 | 0.56 | 0.71 | 0.37 | 0.73 |
| 3239: 236 | 821 | 0.46 | 0.42 | 0.39 | 0.39 | 0.22 | 0.44 | 0.24 | 0.44 | 0.36 | 0 | 0.25 | 0.31 |
| 3239: 242 | 827 | 0.41 | 0.41 | 0.35 | 0.27 | 0.2 | 0.41 | 0.12 | 0.36 | 0.49 | 0.08 | 0.43 | 0.57 |
| 3239: 250 | 835 | 0.57 | 0.31 | 0.52 | 0.4 | 0.47 | 0.16 | 0.46 | 0.54 | 0.59 | 0.45 | 0.33 | 0.78 |
| 3239: 256 | 841 | 0.37 | 0.27 | 0.42 | 0.39 | 0.21 | 0.18 | 0.27 | 0.44 | 0.4 | 0 | 0.9 | 0.29 |
| 3239: 262 | 847 | 0.17 | 0 | 0.27 | 0 | 0.075 | 0.015 | 0.064 | 0.11 | 0.19 | 0 | 0 | 0.1 |
| 3239: 285 | 870 | 0.13 | 0 | 0 | 0.27 | 0.052 | 0.0058 | 0.005 | 0.035 | 0.042 | 0 | 0 | 0.0028 |
| 3239: 300 | 885 | 0.1 | 0.25 | 0 | 0.056 | 0 | 0 | 0 | 0.1 | 0.18 | 0.5 | 0.17 | 0.064 |
| 3239: 319 | 904 | 0 | 0 | 0.03 | 0 | 0 | 0.0054 | 0 | 0 | 0 | 0 | 0 | 0 |
| 3239: 328 | 913 | 0.086 | 0.15 | 0.15 | 0 | 0.19 | 0.25 | 0.059 | 0.13 | 0.35 | 0 | 0.019 | 0.46 |
| 3239: 337 | 922 | 0.14 | 0 | 0.12 | 0.21 | 0.18 | 0.19 | 0.14 | 0.24 | 0 | 0 | 0.02 | 0.23 |
| 3239: 340 | 925 | 0 | 0 | 0 | 0 | 0 | 0.17 | 0.064 | 0 | 0 | 0 | 0 | 0 |
| 3239: 343 | 928 | 0 | 0.05 | 0 | 0.067 | 0 | 0.13 | 0.097 | 0 | 0.37 | 0 | 0.033 | 0 |
| 3239: 348 | 933 | 0 | 0.31 | 0.14 | 0.095 | 0 | 0.098 | 0.089 | 0 | 0 | 0.34 | 0.2 | 0 |
| 3239: 354 | 939 | 0.073 | 0 | 0.1 | 0 | 0 | 0 | 0 | 0.08 | 0 | 0 | 0 | 0 |
| 3239: 360 | 945 | 0.17 | 0.62 | 0.11 | 0 | 0.18 | 0.26 | 0.082 | 0.33 | 0.19 | 0.28 | 0.027 | 0.2 |
| 3239: 366 | 951 | 0.27 | 0 | 0.3 | 0.11 | 0.11 | 0.3 | 0.12 | 0.24 | 0.24 | 0 | 0.029 | 0.15 |
| 3239: 377 | 962 | 0 | 0 | 0 | 0 | 0.045 | 0.057 | 0 | 0.14 | 0.35 | 0 | 0 | 0.0039 |
| 3239: 421 | 1006 | 0.54 | 1 | 0.17 | 0 | 0 | 0.5 | 0.26 | 0.06 | 0.065 | 1 | 0.39 | 0.35 |

| | MVP | | | | | | | | | | | | | | |
|---|---|---|---|---|---|---|---|---|---|---|---|---|---|---|---|
| CpG | Position in | | | | | | | | | | | | | | |
| identifier | ROI | Muscle | Lung | Lung | Lung | Lung | Lung | Liver | Liver | Breast | Breast | Breast | Breast | Breast | Breast |
| 3239: 38 | 623 | 0.85 | 0.87 | NA | 1 | 0.86 | 0.89 | 1 | 0.99 | 0.68 | 0.62 | 0.43 | 0.97 | 0.87 | 0.69 |
| 3239: 44 | 629 | 0.97 | 0.96 | 0.87 | 0.5 | 0.98 | 1 | 1 | 1 | 0.69 | 0.7 | 0.75 | 0.95 | 0.54 | 0.72 |
| 3239: 49 | 634 | 0.37 | 0.54 | 0.74 | 0.78 | 0.42 | 0.25 | 0.75 | 0.73 | 0.24 | 0.2 | 0.18 | 1 | 0.66 | 0.31 |
| 3239: 71 | 656 | 0.38 | 0.63 | 0.66 | 0.76 | 0.64 | 0.85 | 1 | 0.76 | 0.45 | 0.17 | 0.4 | 0.78 | 0.17 | 0.28 |
| 3239: 75 | 660 | 0.078 | 0.21 | 0.046 | 0.0054 | 0.16 | 0.17 | 0 | 0.15 | 0.045 | 0.05 | 0.073 | 0 | 0 | 0 |
| 3239: 88 | 673 | 0.12 | 0.26 | 0.45 | 0 | 0.23 | 0.06 | 0 | 0.39 | 0.097 | 0.018 | 0.055 | 0 | 0.39 | 0.22 |
| 3239: 141 | 726 | 0.3 | 0.47 | 0.5 | 0.13 | 0.42 | 0.13 | 0.3 | 0.63 | 0.2 | 0.23 | 0.38 | 0.55 | 0.72 | 0.016 |
| 3239: 163 | 748 | 0.071 | 0.13 | 0.6 | 1 | 0.33 | 0.24 | NA | 0.28 | 0.084 | 0.099 | 0.064 | 0 | 0.24 | 0.13 |
| 3239: 169 | 754 | 0.51 | 0.64 | 0.78 | 1 | 0.62 | 0.78 | 0 | 0.87 | 0.45 | 0.28 | 0.23 | 0.5 | 0.23 | 0.22 |
| 3239: 178 | 763 | 0.65 | 0.65 | 0.86 | 1 | 0.7 | 0.88 | NA | 0.86 | 0.31 | 0.19 | 0.061 | 0.37 | 0.89 | 0.41 |
| 3239: 197 | 782 | 0.5 | 0.8 | 0.94 | 1 | 0.77 | 0.58 | 0.75 | 0.97 | 0.61 | 0.45 | 0.33 | 0.59 | 0.7 | 0.46 |
| 3239: 212 | 797 | 0.57 | 0.74 | 0.92 | 0.93 | 0.75 | 0.62 | NA | 0.96 | 0.42 | 0.39 | 0.19 | 0.17 | 0.73 | 0.46 |
| 3239: 218 | 803 | 0.39 | 0.43 | 0.75 | 0.8 | 0.53 | 0.12 | NA | 0.86 | 0.13 | 0.4 | 0.091 | 0.5 | 0.61 | 0.16 |
| 3239: 233 | 818 | 0.48 | 0.62 | 0.56 | 0.97 | 0.57 | 0.73 | NA | 0.77 | 0.21 | 0.3 | 0.16 | 0.13 | 0.73 | 0.31 |
| 3239: 236 | 821 | 0.34 | 0.46 | 0.6 | 0.89 | 0.46 | 0.75 | NA | 0.57 | 0.1 | 0.0083 | 0 | 0 | 0.35 | 0.075 |
| 3239: 242 | 827 | 0.42 | 0.46 | 0.73 | 0.84 | 0.43 | 0.54 | NA | 0.57 | 0.1 | 0.16 | 0.14 | 0.48 | 0.77 | 0.37 |
| 3239: 250 | 835 | 0.64 | 0.53 | 0.61 | 0.91 | 0.51 | 0.52 | 0 | 0.68 | 0.35 | 0.3 | 0 | 0.56 | 0.27 | 0.38 |
| 3239: 256 | 841 | 0.31 | 0.28 | 0.31 | 0.49 | 0.39 | 0.43 | 1 | 0.25 | 0.28 | 0 | 0 | 0 | 0.0058 | 0.084 |
| 3239: 262 | 847 | 0.37 | 0.12 | 0.00095 | 0.8 | 0.07 | 0.11 | NA | 0.04 | 0.046 | 0 | 0 | 0 | 0 | 0 |
| 3239: 285 | 870 | 0.038 | 0.053 | 0 | 0.7 | 0.25 | 0 | 1 | 0 | 0 | 0 | 0 | 0 | 0 | 0.11 |
| 3239: 300 | 885 | 0.18 | 0.12 | 0.21 | 0 | 0.035 | 0 | NA | 0.19 | 0.34 | 0.14 | 0.061 | 0.21 | 0.31 | 0.25 |
| 3239: 319 | 904 | 0 | 0.037 | 0 | 0 | 0.084 | 0.069 | NA | 0 | 0 | 0 | 0.077 | 0 | 0 | 0 |
| 3239: 328 | 913 | 0.056 | 0 | 0 | 0.84 | 0.23 | 0.26 | NA | 0.3 | 0 | 0 | 0 | 0 | 0 | 0.086 |
| 3239: 337 | 922 | 0 | 0 | 0.34 | 0 | 0.13 | 0.2 | NA | 0.1 | 0 | 0 | 0 | 0 | 0 | 0.1 |
| 3239: 340 | 925 | 0 | 0 | 0 | 0 | 0.12 | 0.29 | NA | 0 | 0 | 0 | 0 | 0 | 0 | 0.067 |
| 3239: 343 | 928 | 0 | 0 | 0.086 | 0 | 0.047 | 0.065 | NA | 0 | 0 | 0 | 0 | 0 | 0 | 0.099 |
| 3239: 348 | 933 | 0 | 0 | 0.17 | 0 | 0.2 | 0.26 | NA | 0.24 | 0.32 | 0.2 | 0.12 | 0.2 | 0.36 | 0.34 |
| 3239: 354 | 939 | 0 | 0 | 0 | 0.27 | 0.24 | 0.37 | NA | 0.0094 | 0 | 0 | 0 | 0 | 0 | 0.22 |
| 3239: 360 | 945 | 0 | 0.32 | 0.066 | 0 | 0.28 | 0.57 | NA | 0.29 | 0 | 0.11 | 0.018 | 0.037 | 0.47 | 0.75 |
| 3239: 366 | 951 | 0 | 0 | 0 | 0.016 | 0.17 | 0.38 | NA | 0 | 0 | 0 | 0 | 0.052 | 0 | 0 |
| 3239: 377 | 962 | 0 | 0 | 0 | 0 | 0.31 | 0 | NA | 0.018 | 0 | 0 | 0 | 0 | 0 | 0 |
| 3239: 421 | 1006 | 0 | 0 | 0 | NA | 0.076 | 0.14 | NA | 0.25 | 0 | 0 | NA | 0.13 | 0.036 | 0.19 |

| CpG identifier | MVP Position in ROI | Brain | Brain | Brain | Brain | Brain |
|---|---|---|---|---|---|---|
| 3239: 38 | 623 | 0.98 | 0.87 | 0.8 | 1 | 0.94 |
| 3239: 44 | 629 | 1 | 1 | 1 | 1 | 0.93 |
| 3239: 49 | 634 | 0.77 | 0.98 | 0.33 | 0.74 | 0.72 |
| 3239: 71 | 656 | 0.86 | 1 | 0.46 | 0.89 | 0.93 |
| 3239: 75 | 660 | 0.25 | 0.25 | 0.16 | 0.28 | 0.27 |
| 3239: 88 | 673 | 0.49 | 0.47 | 0 | 0.45 | 0.32 |
| 3239: 141 | 726 | 0.67 | 1 | 0.36 | 0.66 | 0.85 |
| 3239: 163 | 748 | 0.59 | 0.58 | 0 | 0.53 | 0.45 |
| 3239: 169 | 754 | 0.95 | 0.92 | 0.34 | 0.84 | 0.68 |
| 3239: 178 | 763 | 0.94 | 0.86 | 0.3 | 0.81 | 0.94 |
| 3239: 197 | 782 | 1 | 1 | 0.67 | 0.96 | 1 |
| 3239: 212 | 797 | 0.98 | 1 | 0.55 | 0.97 | 0.98 |
| 3239: 218 | 803 | 0.8 | 1 | 0.088 | 0.78 | 0.65 |
| 3239: 233 | 818 | 0.95 | 1 | 0.45 | 0.92 | 0.92 |
| 3239: 236 | 821 | 0.68 | 0.69 | 0.16 | 0.66 | 0.62 |
| 3239: 242 | 827 | 0.71 | 1 | 0.54 | 0.7 | 0.65 |
| 3239: 250 | 835 | 0.75 | 0.83 | 0.44 | 0.66 | 0.75 |
| 3239: 256 | 841 | 0.54 | 0.8 | 0 | 0.49 | 0.5 |
| 3239: 262 | 847 | 0.37 | 0.17 | 0.048 | 0.48 | 0.37 |
| 3239: 285 | 870 | 0.22 | 0.39 | 0.036 | 0.17 | 0.14 |
| 3239: 300 | 885 | 0.17 | 0.27 | 0.29 | 0.064 | 0 |
| 3239: 319 | 904 | 0.22 | 0.34 | 0 | 0.14 | 0.084 |
| 3239: 328 | 913 | 0.66 | 0.78 | 0.26 | 0.62 | 0.45 |
| 3239: 337 | 922 | 0.15 | 0.2 | 0.19 | 0.12 | 0 |
| 3239: 340 | 925 | 0.2 | 0.55 | 0 | 0.42 | 0.0049 |
| 3239: 343 | 928 | 0.12 | 0.11 | 0.11 | 0.011 | 0 |
| 3239: 348 | 933 | 0.17 | 0.27 | 0.36 | 0.076 | 0.28 |
| 3239: 354 | 939 | 0.4 | 0.56 | 0.32 | 0.33 | 0.082 |
| 3239: 360 | 945 | 0.52 | 0.6 | 0.11 | 0.41 | 0.25 |
| 3239: 366 | 951 | 0.44 | 0.21 | 0 | 0.51 | 0.2 |
| 3239: 377 | 962 | 0.057 | 0.24 | 0 | 0 | 0 |
| 3239: 421 | 1006 | 0.38 | 0.46 | 0.49 | 1 | 1 |

[0313] TABLE 23
(3243):

| | MVP Position in | | | | | | | | | | | | |
|---|---|---|---|---|---|---|---|---|---|---|---|---|---|
| CpG identifier | ROI | Prostate | Prostate | Prostate | Prostate | Prostate | Prostate | Prostate | Prostate | Muscle | Muscle | Muscle | Muscle |
| 3243: 57 | 1576 | NA | 1 | NA | NA | NA | 1 | NA | 1 | 1 | NA | NA | 1 |
| 3243: 63 | 1582 | NA | 1 | 1 | 1 | 1 | 1 | NA | NA | NA | 1 | 1 | 1 |
| 3243: 132 | 1651 | 0.72 | 0.47 | 0.81 | 0.73 | 0.75 | 0.84 | 0.75 | 0.65 | 0.64 | 1 | 0.84 | 0.69 |
| 3243: 138 | 1657 | 0.66 | 0.43 | 0.97 | 0.83 | 0.75 | 0.77 | 0.73 | 0.71 | 0.87 | 1 | 0.88 | 0.94 |
| 3243: 140 | 1659 | 0.78 | 0.68 | 1 | 0.71 | 1 | 0.64 | 0.5 | 1 | 0.86 | 1 | 0.92 | 1 |
| 3243: 155 | 1674 | 1 | 0.46 | 0.94 | 1 | 1 | 1 | 0.89 | 0.78 | 1 | 1 | 0.73 | 0.93 |
| 3243: 182 | 1701 | 0.62 | 0.75 | 0.9 | 0.82 | 0.87 | 0.87 | 0.82 | 0.81 | 0.74 | 1 | 1 | 0.76 |
| 3243: 229 | 1748 | 0.36 | 0.26 | 0.54 | 0.63 | NA | 0.9 | 0.3 | 0.55 | NA | 0.58 | 0.51 | 0.64 |
| 3243: 252 | 1771 | 0.39 | 0.25 | 0.3 | 0.29 | 0.47 | 0.82 | 0.45 | 0.19 | 0.18 | 0.16 | NA | 0.41 |
| 3243: 263 | 1782 | 0.56 | 0.29 | 0.41 | 0.24 | 0.54 | 0.71 | 0.7 | 0.27 | 0.21 | 1 | 0.33 | 0.58 |
| 3243: 311 | 1830 | 0.71 | 0.26 | 0.77 | 0.47 | 0.74 | 0.6 | 0.77 | 0.86 | 0.62 | 0 | 0.69 | 0.43 |
| 3243: 392 | 1911 | NA | NA | NA | 0.51 | NA | NA | NA | NA | NA | NA | 1 | 0.84 |

| | MVP | | | | | | | | | | | | | | |
|---|---|---|---|---|---|---|---|---|---|---|---|---|---|---|---|
| CpG identifier | Position in ROI | Muscle | Lung | Lung | Lung | Lung | Lung | Liver | Liver | Breast | Breast | Breast | Breast | Breast | Brain |
| 3243: 57 | 1576 | NA | 1 | 0 | 1 | NA | 1 | NA | 1 | NA | 0.9 | NA | NA | NA | 1 |
| 3243: 63 | 1582 | 1 | 1 | NA | 1 | NA | 1 | NA | NA | NA | 1 | NA | NA | NA | 1 |
| 3243: 132 | 1651 | 0.83 | 0.76 | 0.6 | 0.49 | 0.85 | 0.8 | 0.17 | 0.85 | 0.72 | 0.47 | 0.48 | 0.72 | 0.74 | 0.64 |
| 3243: 138 | 1657 | 1 | 0.89 | 0.5 | 0.39 | 0.66 | 0.69 | 0.24 | 0.7 | 0.54 | 0.69 | 0.48 | 0.52 | 0.44 | 1 |
| 3243: 140 | 1659 | 1 | 1 | 0.41 | 0.47 | 1 | 0.91 | 0 | 1 | 0.76 | 0.66 | 0.51 | 0.68 | 0.26 | 1 |
| 3243: 155 | 1674 | 0.93 | 1 | 0.89 | 0.55 | 0.92 | 0.86 | 0.037 | 0.91 | 0.31 | 0.35 | 0.3 | 0.73 | 0.24 | 1 |
| 3243: 182 | 1701 | 0.87 | 0.81 | 0.69 | 0.6 | 0.75 | 0.94 | 0 | 1 | 0.65 | 0.59 | 0.57 | 0.6 | 0.41 | 0.98 |
| 3243: 229 | 1748 | 0.4 | 0.74 | 0.98 | 0.39 | 0.73 | 0.75 | 0 | 0.68 | 0.27 | 0.3 | 0.24 | 0.25 | 0.38 | 0.88 |
| 3243: 252 | 1771 | 0.49 | 0.62 | 0.15 | 0.27 | 0.64 | 0.66 | 0 | 0.81 | 0.5 | 0.15 | 0.25 | 0 | 0.22 | 0.75 |
| 3243: 263 | 1782 | 0.94 | 0.75 | 0.78 | 0 | 0.53 | 0.8 | NA | 1 | 0.29 | 0.35 | 0.23 | 0 | 0.55 | 0.91 |
| 3243: 311 | 1830 | 0.36 | 0.58 | NA | 0 | 0.87 | 0.71 | 0.2 | 0.67 | 0.14 | 0.23 | 0.26 | 0 | 0.24 | 0.86 |
| 3243: 392 | 1911 | NA | NA | NA | NA | NA | NA | NA | NA | NA | NA | NA | NA | NA | NA |

| CpG identifier | MVP Position in ROI | Brain | Brain | Brain | Brain | Breast |
|---|---|---|---|---|---|---|
| 3243: 57 | 1576 | NA | NA | 1 | 1 | 1 |
| 3243: 63 | 1582 | 1 | 1 | 1 | 1 | 1 |
| 3243: 132 | 1651 | 0.62 | 0.58 | 0.93 | 0.72 | 0.57 |
| 3243: 138 | 1657 | 0.92 | 0.78 | 0.97 | 0.85 | 0.51 |
| 3243: 140 | 1659 | 0.78 | 0.78 | 1 | 1 | 0.63 |
| 3243: 155 | 1674 | 0.82 | 0.74 | 1 | 1 | 0.32 |
| 3243: 182 | 1701 | 1 | 0.77 | 0.92 | 0.92 | 0.65 |
| 3243: 229 | 1748 | 1 | 0.6 | 0.91 | 0.65 | 0.33 |
| 3243: 252 | 1771 | 0.72 | 0.44 | 0.76 | 0.69 | 0.34 |
| 3243: 263 | 1782 | 1 | 0.56 | 1 | 1 | 0.31 |
| 3243: 311 | 1830 | 0.81 | 0.5 | 1 | 0.67 | 0.6 |
| 3243: 392 | 1911 | NA | 0.65 | 1 | 1 | NA |

[0314] TABLE 24
(3244):

| | MVP Position in | | | | | | | | | | | | |
|---|---|---|---|---|---|---|---|---|---|---|---|---|---|
| CpG identifier | ROI | Prostate | Prostate | Prostate | Prostate | Prostate | Prostate | Prostate | Prostate | Muscle | Muscle | Muscle | Muscle |
| 3244: 40 | 141 | 1 | 1 | 0.75 | 0.97 | 0.71 | 0.92 | 0.69 | 0.91 | 0.54 | 0.5 | 0.88 | 0.5 |
| 3244: 79 | 180 | 0.93 | 0.86 | 0.91 | 1 | 0.95 | 0.9 | 0.92 | 0.91 | 0.87 | 0.5 | 0.64 | 1 |
| 3244: 173 | 274 | 0.61 | 0.59 | 0.63 | 0.63 | 0.65 | 0.53 | 0.87 | 0.67 | 0.45 | 0.13 | 0.41 | 0.21 |
| 3244: 208 | 309 | 0.62 | 0.59 | 0.58 | 0.59 | 0.5 | 0.89 | 0.6 | 0.64 | 0.27 | 0 | 0.19 | 0.11 |
| 3244: 217 | 318 | 0.63 | 0.7 | 0.6 | 0.64 | 0.53 | 0.65 | 0.77 | 0.58 | 0.36 | 0.14 | 0.33 | 0.21 |
| 3244: 223 | 324 | 0.56 | 0.57 | 0.55 | 0.56 | 0.54 | 0.5 | 0.82 | 0.59 | 0.31 | 0.12 | 0.13 | 0.16 |
| 3244: 228 | 329 | 0.62 | 0.66 | 0.29 | 0.68 | 0.75 | 0.71 | 0.81 | 0.69 | 0.59 | 0.28 | 0.4 | 0.25 |
| 3244: 240 | 341 | 0.87 | 0.95 | 0.74 | 0.86 | 0.83 | 0.87 | 0.86 | 0.88 | 0.4 | 0.76 | 0.62 | 0.15 |

| | MVP | | | | | | | | | | | | | | |
|---|---|---|---|---|---|---|---|---|---|---|---|---|---|---|---|
| CpG identifier | Position in ROI | Muscle | Lung | Lung | Lung | Lung | Lung | Liver | Liver | Breast | Breast | Breast | Breast | Breast | Breast |
| 3244: 40 | 141 | 0.5 | 1 | 0.93 | 0.82 | 1 | 0.5 | 1 | 0.7 | 1 | 0.84 | 0.66 | 0.81 | 1 | 1 |
| 3244: 79 | 180 | 1 | 0.8 | 0.89 | 0.74 | 1 | 0.84 | 0.73 | 0.9 | 1 | 0.86 | 0.92 | 0.79 | 0.9 | 0.85 |
| 3244: 173 | 274 | 0.19 | 0.51 | 0.54 | 0.78 | 0.56 | 0.78 | 0.43 | 0.65 | 0.78 | 0.61 | 0.64 | 0.38 | 0.77 | 0.6 |
| 3244: 208 | 309 | 0.14 | 0.46 | 0.69 | 0.71 | 0.56 | 0.78 | 1 | 0.49 | 0.64 | 0.59 | 0.58 | 0.22 | 0.5 | 0.48 |
| 3244: 217 | 318 | 0.16 | 0.46 | 0.67 | 0.62 | 0.53 | 0.71 | 0.71 | 0.52 | 0.74 | 0.5 | 0.65 | 0.66 | 0.65 | 0.64 |
| 3244: 223 | 324 | 0.15 | 0.51 | 0.58 | 0.35 | 0.47 | 0.41 | 0.77 | 0.43 | 0.78 | 0.48 | 0.52 | 0.77 | 0.36 | 0.37 |
| 3244: 228 | 329 | 0.35 | 0.74 | 0.57 | 0.64 | 0.26 | 0.67 | NA | 0.63 | 0.84 | 0.59 | 0.75 | 1 | 0.64 | 0.62 |
| 3244: 240 | 341 | 0.19 | 0.82 | 0.88 | 0.93 | 0.91 | 0.97 | 0.2 | 0.83 | 0.83 | 0.54 | 0.9 | 0.78 | 0.78 | 1 |

| CpG identifier | MVP Position in ROI | Brain | Brain | Brain | Brain | Brain | Brain |
|---|---|---|---|---|---|---|---|
| 3244: 40 | 141 | 1 | 0.4 | 1 | 0.9 | 0.5 | NA |
| 3244: 79 | 180 | 1 | 0.43 | 0.7 | 0.87 | 1 | 1 |
| 3244: 173 | 274 | 0.8 | 0.72 | 0.73 | 0.38 | 0.81 | 0.78 |
| 3244: 208 | 309 | 0.6 | 0.46 | 0.65 | 0.81 | 0.61 | 0.47 |
| 3244: 217 | 318 | 0.73 | 0.41 | 0.72 | 0.48 | 0.78 | 0.67 |
| 3244: 223 | 324 | 0.87 | 0.19 | 0.42 | 0.34 | 0.79 | 0.6 |
| 3244: 228 | 329 | 0.68 | 0.27 | 0.55 | 0.43 | 0.83 | 0.77 |
| 3244: 240 | 341 | 0.85 | 0.85 | 0 | 0.8 | 0.71 | 0.71 |

[0315] TABLE 25
(3252):

| | MVP Position in | | | | | | | | | | | | |
|---|---|---|---|---|---|---|---|---|---|---|---|---|---|
| CpG identifier | ROI | Prostate | Prostate | Prostate | Prostate | Prostate | Prostate | Prostate | Prostate | Muscle | Muscle | Muscle | Muscle |
| 3252: 39 | 740 | 1 | NA | 0.82 | 0.51 | 1 | NA | 1 | 1 | 0.68 | NA | NA | 0.35 |
| 3252: 43 | 744 | 1 | NA | 1 | 1 | 1 | 1 | 1 | 1 | 1 | NA | NA | 0.97 |
| 3252: 88 | 789 | 0.95 | NA | 1 | 0.97 | 1 | 1 | 0.94 | 0.91 | 0.69 | NA | NA | 0.86 |
| 3252: 91 | 792 | 1 | NA | 0.85 | 0.91 | 0.87 | 1 | 0.9 | 0.85 | 0.57 | 0 | NA | 0.55 |
| 3252: 94 | 795 | 1 | NA | 0.73 | 0.73 | 1 | 0.67 | 1 | 0.93 | 0.78 | 1 | NA | 0.64 |
| 3252: 152 | 853 | 0.72 | 0.41 | 0.48 | 0.6 | 0.63 | 0.73 | 0.8 | 0.68 | 0.44 | 0 | 0 | 0.53 |
| 3252: 164 | 865 | 0.86 | NA | 0.59 | 0.66 | 0.64 | 0.52 | 0.71 | 0.77 | 0.46 | 0.17 | NA | 0.6 |
| 3252: 175 | 876 | 0.87 | 0.94 | 0.82 | 0.81 | 0.7 | 0.78 | 0.83 | 0.8 | 0.54 | 0.087 | NA | 0.63 |
| 3252: 178 | 879 | 0.74 | 0.6 | 0.64 | 0.66 | 0.54 | 0.55 | 0.64 | 0.67 | 0.42 | 0.26 | 0.34 | 0.46 |
| 3252: 199 | 900 | 0.95 | 1 | 0.95 | 0.9 | 0.84 | 0.93 | 0.94 | 0.85 | 0.53 | 0.1 | 1 | 0.64 |
| 3252: 206 | 907 | 0.8 | 0.88 | 0.84 | 0.82 | 0.62 | 0.81 | 0.84 | 0.67 | 0.36 | 0 | 0.32 | 0.49 |
| 3252: 242 | 943 | 0.95 | NA | 0.77 | 0.74 | 0.56 | 0.68 | 0.67 | 0.74 | 0.38 | 0.34 | 1 | 0.57 |
| 3252: 297 | 998 | 1 | NA | 1 | 0.91 | 0.86 | 0.97 | 0.81 | 0.92 | 0.77 | 0.23 | 1 | 0.87 |
| 3252: 303 | 1004 | 1 | NA | 1 | 0.98 | 0.81 | 1 | 0.93 | 0.96 | 1 | 0.06 | 1 | 0.99 |
| 3252: 308 | 1009 | 0.76 | NA | 0.5 | 0.57 | 0.26 | 0.51 | 0.35 | 0.52 | 0.35 | 0.0054 | 0.95 | 0.58 |
| 3252: 330 | 1031 | 0.62 | NA | 0.61 | 0.48 | 0.39 | 0.32 | 0.38 | 0.35 | 0.28 | 0 | 0.43 | 0.51 |
| 3252: 334 | 1035 | 0.44 | NA | 0.49 | 0.31 | 0 | 0.15 | 0.21 | 0.29 | 0 | 0.054 | 0.044 | 0.33 |
| 3252: 347 | 1048 | 0.57 | NA | NA | 0.29 | NA | 0.26 | NA | 0.31 | 0 | 0.0088 | NA | 0.5 |

| | MVP | | | | | | | | | | | | | | |
|---|---|---|---|---|---|---|---|---|---|---|---|---|---|---|---|
| CpG identifier | Position in ROI | Muscle | Lung | Lung | Lung | Lung | Lung | Liver | Liver | Breast | Breast | Breast | Breast | Breast | Brain |
| 3252: 39 | 740 | 0.33 | 0.91 | NA | 1 | 0.84 | 1 | NA | 0.88 | 0.68 | 1 | 0.7 | 1 | 1 | 0.33 |
| 3252: 43 | 744 | 1 | 1 | 1 | 1 | 1 | 1 | NA | 1 | 1 | 1 | 1 | 1 | NA | 1 |
| 3252: 88 | 789 | 0.31 | 0.91 | 1 | 1 | 1 | 0.94 | NA | 1 | 1 | 0.85 | 0.86 | 0.79 | 0.75 | 1 |
| 3252: 91 | 792 | 0.31 | 1 | 1 | 1 | 1 | 0.74 | NA | 1 | 0.7 | 0.75 | 0.66 | 0.79 | 0.92 | 0.89 |
| 3252: 94 | 795 | 0.3 | 1 | 0.41 | 1 | 0.8 | 0.71 | NA | 0.85 | 0.68 | 1 | 0.71 | 0.68 | 0.65 | 0.69 |
| 3252: 152 | 853 | 0.19 | 0.86 | 0.64 | 1 | 0.72 | 1 | NA | 0.86 | 0.44 | 0.62 | 0.54 | 0.83 | 0.58 | 0.95 |
| 3252: 164 | 865 | 0.21 | 0.82 | 0.68 | 1 | 0.72 | 0.66 | NA | 0.81 | 0.41 | 0.64 | 0.51 | 0.65 | 0.56 | 0.71 |
| 3252: 175 | 876 | 0.28 | 0.85 | 1 | 1 | 0.93 | 0.63 | NA | 1 | 0.61 | 0.67 | 0.55 | 1 | 0.15 | 0.98 |
| 3252: 178 | 879 | 0.18 | 0.67 | 0.33 | 1 | 0.62 | 0.85 | NA | 0.69 | 0.33 | 0.43 | 0.49 | 0.43 | 0.49 | 0.59 |
| 3252: 199 | 900 | 0.33 | 0.91 | 1 | 1 | 0.93 | 0.86 | NA | 0.99 | 0.59 | 0.75 | 0.73 | 1 | 0.72 | 0.96 |
| 3252: 206 | 907 | 0.2 | 0.8 | 1 | 0.82 | 0.83 | 0.85 | NA | 0.87 | 0.54 | 0.24 | 0.45 | 1 | 0.57 | 0.96 |
| 3252: 242 | 943 | 0.58 | 0.77 | 0.96 | 0.79 | 0.86 | 0.97 | NA | 0.8 | 0.38 | 0.34 | 0.38 | 0.94 | 0.58 | 0.89 |
| 3252: 297 | 998 | 0.55 | 0.97 | 1 | 0.95 | 0.92 | 0.97 | NA | 1 | 0.72 | 0.82 | 0.7 | 1 | 0.52 | 1 |
| 3252: 303 | 1004 | 1 | 1 | 1 | 1 | 1 | 0.98 | NA | 1 | 0.53 | 0.85 | 0.78 | 0.84 | 0.63 | 1 |
| 3252: 308 | 1009 | 0.19 | 0.64 | 0.92 | 0.7 | 0.64 | 0.9 | NA | 0.83 | 0.31 | 0.5 | 0.27 | 0.86 | 0.36 | 0.88 |
| 3252: 330 | 1031 | 0 | 0.54 | 1 | 0.62 | 0.7 | 0.61 | NA | 0.49 | 0.45 | 0.34 | 0.51 | 0.89 | 0.25 | 0.78 |
| 3252: 334 | 1035 | 0 | 0.26 | 0.59 | 0.58 | 0.43 | 0.66 | NA | 0.11 | 0.17 | 0.15 | 0.19 | 0.74 | 0.11 | 0.5 |
| 3252: 347 | 1048 | NA | 0.47 | NA | 0 | NA | 0.52 | NA | 0.19 | 0.46 | 0.43 | NA | 0.67 | 0.093 | 0.29 |

| CpG identifier | MVP Position in ROI | Brain | Brain | Brain | Brain | Brain |
|---|---|---|---|---|---|---|
| 3252: 39 | 740 | NA | NA | NA | 1 | 0.82 |
| 3252: 43 | 744 | 0.98 | NA | NA | 1 | 1 |
| 3252: 88 | 789 | 1 | NA | NA | 0.96 | 1 |
| 3252: 91 | 792 | 0.69 | NA | 1 | 0.77 | 0.82 |
| 3252: 94 | 795 | 0.46 | NA | NA | 0.91 | 0.75 |
| 3252: 152 | 853 | 0.19 | NA | NA | 0.66 | 0.7 |
| 3252: 164 | 865 | 0.35 | NA | 0.28 | 0.8 | 0.78 |
| 3252: 175 | 876 | 1 | NA | 0.89 | 0.97 | 0.92 |
| 3252: 178 | 879 | 0.49 | NA | 0.73 | 0.51 | 0.64 |
| 3252: 199 | 900 | 1 | NA | 1 | 0.98 | 0.93 |
| 3252: 206 | 907 | 0.95 | NA | 1 | 0.85 | 0.76 |
| 3252: 242 | 943 | 0.98 | NA | NA | 0.89 | 0.67 |
| 3252: 297 | 998 | 1 | NA | 1 | 1 | 1 |
| 3252: 303 | 1004 | 1 | NA | 1 | 1 | 1 |
| 3252: 308 | 1009 | 0.86 | NA | 0.42 | 0.9 | 0.75 |
| 3252: 330 | 1031 | 1 | NA | 0.72 | 0.77 | 0.73 |
| 3252: 334 | 1035 | 0.75 | NA | 0.67 | 0.3 | 0.49 |
| 3252: 347 | 1048 | NA | NA | 0 | 0.62 | 0 |

[0316] TABLE 26
(3265):

| | MVP Position in | | | | | | | | | | | | |
|---|---|---|---|---|---|---|---|---|---|---|---|---|---|
| CpG identifier | ROI | Prostate | Prostate | Prostate | Prostate | Prostate | Prostate | Prostate | Prostate | Muscle | Muscle | Muscle | Muscle |
| 3265: 62 | 716 | 0 | 0.016 | 0.019 | 0.12 | 0.046 | 0 | 0.11 | 0 | 0.41 | 0.26 | 0.062 | 0.37 |
| 3265: 81 | 735 | 0 | 0 | 0.014 | 0 | 0 | 0 | 0 | 0 | 0.048 | 0.047 | 0 | 0.089 |
| 3265: 84 | 738 | 0.054 | 0 | 0.062 | 0.055 | 0.044 | 0.027 | 0 | 0 | 0.23 | 0.38 | 0.34 | 0.22 |
| 3265: 137 | 791 | 0.083 | 0 | 0.047 | 0.23 | 0.23 | 0.055 | 0.18 | 0.021 | 0.2 | 0.3 | 0.23 | 0.36 |
| 3265: 139 | 793 | 0.087 | 0 | 0.067 | 0.037 | 0.08 | 0.077 | 0.19 | 0.021 | 0.092 | 0.081 | 0.01 | 0.23 |
| 3265: 259 | 913 | 0 | 0.032 | 0 | 0.031 | 0.079 | 0 | 0.11 | 0.029 | 0.3 | 0.38 | 0.054 | 0.47 |
| 3265: 337 | 991 | 0.25 | 0.47 | 0.015 | 0 | 0.1 | 0.3 | 0.0081 | 0.063 | 0.37 | 0.4 | 0.39 | 0.35 |
| 3265: 350 | 1004 | 0 | 0.055 | 0.31 | 0.029 | 0.13 | 0.25 | 0.34 | 0.0035 | 0.071 | 0.27 | 0.13 | 0.2 |
| 3265: 362 | 1016 | 0 | 0 | 0 | 0.0039 | 0.024 | 0.00065 | 0.019 | 0.038 | 0.13 | 0.36 | 0.0078 | 0.27 |
| 3265: 395 | 1049 | 0.042 | 0 | 0.035 | 0.008 | 0.15 | 0.091 | 0.084 | 0.067 | 0.33 | 0.43 | 0.7 | 0.33 |
| 3265: 404 | 1058 | 0.23 | 0.11 | 0.11 | 0.06 | 0.049 | 0.14 | 0.23 | 0.08 | 0.098 | 0.35 | 0.57 | 0.51 |

| CpG | MVP | | | | | | | | | | | | | | |
|---|---|---|---|---|---|---|---|---|---|---|---|---|---|---|---|
| identifier | Position in ROI | Muscle | Lung | Lung | Lung | Lung | Lung | Liver | Liver | Breast | Breast | Breast | Breast | Breast | Breast |
| 3265: 62 | 716 | 0.11 | 0.086 | 0.18 | 0 | 0 | 0.15 | 0.11 | NA | 0.02 | 0 | 0.052 | 0 | 0.39 | 0.091 |
| 3265: 81 | 735 | 0.018 | 0 | 0 | 0 | 0.043 | 0 | 0.023 | NA | 0 | 0 | 0 | 0.2 | 0 | 0.14 |
| 3265: 84 | 738 | 0.4 | 0 | 0.033 | 0 | 0 | 0.036 | 0.098 | NA | 0.031 | 0 | 0.046 | 0.15 | 0.0074 | 0.037 |
| 3265: 137 | 791 | 0.33 | 0 | 0.29 | 0 | 0.085 | 0.14 | 0.092 | 0 | 0.22 | 0.063 | 0.076 | 0 | 0 | 0.18 |
| 3265: 139 | 793 | 0.22 | 0.13 | 0.12 | 0.14 | 0.088 | 0 | 0.12 | 0 | 0 | 0.037 | 0.097 | 0.027 | 0 | 0.22 |
| 3265: 259 | 913 | 0.43 | 0.11 | 0.033 | NA | 0 | 0 | 0.31 | 0 | 0.3 | 0.14 | 0.083 | 0 | 0.3 | 0 |
| 3265: 337 | 991 | 0.54 | 0.15 | 0.041 | 0 | 0.028 | 0.29 | 0.48 | 0.89 | 0.45 | 0.067 | 0.18 | 0.17 | 0.65 | 0.12 |
| 3265: 350 | 1004 | 0.35 | 0.11 | 0.074 | 0 | 0.058 | 0 | 0.11 | 0.22 | 0 | 0 | 0 | 0.077 | 0 | 0 |
| 3265: 362 | 1016 | 0.21 | 0.0025 | 0 | 0 | 0.096 | 0 | 0.027 | NA | 0 | 0 | 0 | 0.031 | 0 | 0 |
| 3265: 395 | 1049 | 0.4 | 0.14 | 0.085 | 0 | 0.12 | 0.018 | 0.046 | 1 | 0 | 0 | 0.11 | 0.049 | 0.21 | 0 |
| 3265: 404 | 1058 | 0.57 | 0.14 | 0.1 | 0 | 0.1 | 0.2 | 0.36 | 0.7 | 0.3 | 0.048 | 0.27 | 0.022 | 0.16 | 0.6 |

| CpG identifier | MVP Position in ROI | Brain | Brain | Brain | Brain | Brain |
|---|---|---|---|---|---|---|
| 3265: 62 | 716 | 0 | 0.095 | 0.12 | 0.25 | 0.14 |
| 3265: 81 | 735 | 0 | 0 | 0 | 0.0014 | 0.09 |
| 3265: 84 | 738 | 0.06 | 0 | 0.052 | 0.05 | 0.048 |
| 3265: 137 | 791 | 0.15 | 0 | 0.48 | 0.21 | 0.19 |
| 3265: 139 | 793 | 0.0092 | 0.077 | 0 | 0.18 | 0 |
| 3265: 259 | 913 | 0.033 | 0.13 | 0 | 0.22 | 0 |
| 3265: 337 | 991 | 0.092 | 0.5 | 0.37 | 0.26 | 0.065 |
| 3265: 350 | 1004 | 0 | 0.037 | 0.13 | 0 | 0 |
| 3265: 362 | 1016 | 0.024 | 0.024 | 0.3 | 0.0081 | 0.19 |
| 3265: 395 | 1049 | 0 | 0.02 | 0 | 0.21 | 0.11 |
| 3265: 404 | 1058 | 0.42 | 0.14 | 0.25 | 0.22 | 0.089 |

[0317] TABLE 27
(3291):

| | MVP Position in | | | | | | | | | | | | |
|---|---|---|---|---|---|---|---|---|---|---|---|---|---|
| CpG identifier | ROI | Prostate | Prostate | Prostate | Prostate | Prostate | Prostate | Prostate | Prostate | Muscle | Muscle | Muscle | Muscle |
| 3291: 42 | 247 | 0.92 | 0.75 | 1 | 0.97 | 0.89 | 0.97 | 0.95 | 0.75 | 0.85 | 0.64 | 0.8 | 0.72 |
| 3291: 64 | 269 | 0.52 | 0.45 | 0.56 | 0.55 | 0.4 | 0.63 | 0.47 | 0.34 | 0.6 | 0.42 | 0.5 | 0.44 |
| 3291: 71 | 276 | 0.8 | 0.8 | 0.74 | 0.92 | 0.83 | 0.85 | 0.36 | 0.68 | 0.84 | 0.74 | 0.82 | 0.64 |
| 3291: 81 | 286 | 0.48 | 0.43 | 0.48 | 0.41 | 0.47 | 0.52 | 0.49 | 0.34 | 0.45 | 0.27 | 0.5 | 0.48 |
| 3291: 369 | 574 | 0.89 | 0.87 | 1 | 1 | 0.91 | 1 | 1 | 0.94 | 0.91 | 1 | 0.94 | 0.91 |

| | MVP Position in | | | | | | | | | | | | | | |
|---|---|---|---|---|---|---|---|---|---|---|---|---|---|---|---|
| CpG identifier | ROI | Lung | Lung | Lung | Lung | Lung | Liver | Breast | Breast | Breast | Breast | Breast | Brain | Brain | Brain |
| 3291: 42 | 247 | 0.68 | 0.55 | 0.38 | 0.27 | 0.35 | 0.75 | 0.54 | 0.36 | 0.66 | 0.91 | 0.87 | 0.81 | 1 | 0.73 |
| 3291: 64 | 269 | 0.37 | 0.22 | 0.22 | 0.64 | 0.46 | 0.39 | 0.2 | 0.24 | 0.2 | 0.4 | 0.68 | 0.79 | 0.6 | NA |
| 3291: 71 | 276 | 0.67 | 0.55 | 0.53 | 0.57 | 0.41 | 0.88 | 0.5 | 0.5 | 0.63 | 0.62 | 0.91 | 0.86 | 0.95 | 0.84 |
| 3291: 81 | 286 | 0.41 | 0.075 | 0.0075 | 0.26 | 0.23 | 0.22 | 0.56 | 0.00053 | 0.44 | 0.23 | 0.41 | 0.65 | 0.67 | 0.61 |
| 3291: 369 | 574 | 0.92 | 0.94 | 0.76 | 0.68 | 0.76 | 0.92 | 0.86 | 1 | 0.86 | 1 | NA | 1 | 1 | NA |

| CpG identifier | MVP Position in ROI | Brain | Brain | Brain |
|---|---|---|---|---|
| 3291: 42 | 247 | 1 | 1 | 0.86 |
| 3291: 64 | 269 | 0.12 | 1 | 0.58 |
| 3291: 71 | 276 | NA | 1 | 0.87 |
| 3291: 81 | 286 | 0 | 0.79 | 0.79 |
| 3291: 369 | 574 | 1 | 1 | 0.97 |

[0318] TABLE 28
(3312):

| | MVP Position in | | | | | | | | | | | | |
|---|---|---|---|---|---|---|---|---|---|---|---|---|---|
| CpG identifier | ROI | Prostate | Prostate | Prostate | Prostate | Prostate | Prostate | Prostate | Prostate | Muscle | Muscle | Muscle | Muscle |
| 3312: 71 | 1498 | 1 | 1 | NA | 0.54 | 1 | 1 | 1 | 1 | 1 | 0.88 | 1 | 1 |
| 3312: 95 | 1522 | 1 | 1 | 1 | 0.71 | 1 | 0.74 | 1 | 1 | 1 | 1 | 0.72 | 1 |
| 3312: 103 | 1530 | 1 | 1 | 1 | 0.79 | 1 | 0.65 | 1 | 0.81 | 0.6 | 0.58 | 1 | 0.64 |
| 3312: 119 | 1546 | 1 | 1 | 1 | 1 | 1 | 1 | 1 | 1 | 0.74 | 0.71 | 0.88 | 0.82 |
| 3312: 158 | 1585 | 0.9 | 0.94 | 0.91 | 0.83 | 0.86 | 0.91 | 0.87 | 1 | 0.47 | 0.47 | 0.79 | 0.43 |
| 3312: 167 | 1594 | 1 | 1 | 1 | 1 | 1 | 1 | 1 | 1 | 0.96 | 0.92 | 0.88 | 0.9 |
| 3312: 193 | 1620 | 0.84 | 0.94 | 0.93 | 0.89 | 0.71 | 0.74 | 0.76 | 0.92 | 0.73 | 0.73 | 0.7 | 0.72 |
| 3312: 215 | 1642 | 0.88 | 0.92 | 0.88 | 0.88 | 0.94 | 0.94 | 0.88 | 1 | 0.82 | 0.8 | 1 | 0.8 |
| 3312: 223 | 1650 | 0.9 | 0.96 | 0.9 | 1 | 1 | 1 | 0.97 | 1 | 0.88 | 0.88 | 0.56 | 0.83 |
| 3312: 242 | 1669 | 0.89 | 0.93 | 0.91 | 1 | 1 | 0.96 | 0.94 | 1 | 0.9 | 0.93 | 0.9 | 0.89 |
| 3312: 259 | 1686 | 1 | 0.97 | 1 | 1 | 1 | 1 | 1 | NA | 1 | 1 | 1 | 1 |
| 3312: 273 | 1700 | 1 | 0.95 | 0.91 | 1 | 1 | 1 | 1 | 1 | 0.84 | 0.84 | 0.85 | 0.86 |
| 3312: 314 | 1741 | 0.76 | 0.7 | 0.71 | 1 | 0.73 | 1 | 0.83 | 1 | 0.73 | 0.67 | 0.29 | 0.8 |
| 3312: 404 | 1831 | 0.91 | 0.86 | 0.77 | 1 | 0.54 | 1 | 0.87 | 1 | 0.76 | 0.75 | 0.35 | 0.79 |
| 3312: 412 | 1839 | 0.95 | 1 | 0.93 | 0.98 | 1 | 0.96 | 0.97 | 1 | 1 | 1 | NA | 0.96 |

| | MVP Position in | | | | | | | | | | | | | | |
|---|---|---|---|---|---|---|---|---|---|---|---|---|---|---|---|
| CpG identifier | ROI | Muscle | Lung | Lung | Lung | Lung | Lung | Liver | Liver | Breast | Breast | Breast | Breast | Breast | Brain |
| 3312: 71 | 1498 | 1 | 1 | 1 | 1 | NA | 1 | 0.8 | 0 | 1 | 1 | 1 | NA | 1 | 1 |
| 3312: 95 | 1522 | 1 | 1 | 1 | 1 | 1 | 1 | 0.53 | 0.22 | 1 | 1 | 1 | 1 | 1 | 1 |
| 3312: 103 | 1530 | 0.58 | 1 | 1 | 1 | 1 | 0.79 | 0.51 | 0.27 | 0.87 | 1 | 0.74 | 1 | 0.71 | 0.84 |
| 3312: 119 | 1546 | 0.91 | 1 | 1 | 1 | 1 | 1 | NA | 0 | 0.82 | 1 | 0.87 | 1 | 1 | 1 |
| 3312: 158 | 1585 | 0.4 | 0.9 | 0.91 | 0.92 | 0.92 | 0.84 | 0.64 | 0 | 0.69 | 0.66 | 0.52 | 0.58 | 0.67 | 0.88 |
| 3312: 167 | 1594 | 0.95 | 1 | 1 | 1 | 1 | 1 | 0.22 | 0 | 1 | 0.96 | 1 | 1 | 1 | 1 |
| 3312: 193 | 1620 | 0.64 | 0.91 | 0.85 | 0.89 | 1 | 0.87 | 0.65 | 0.045 | 0.81 | 0.79 | 0.82 | 0.86 | 0.77 | 0.76 |
| 3312: 215 | 1642 | 0.81 | 0.88 | 0.89 | 1 | 0.91 | 0.9 | 0 | 0.3 | 0.83 | 0.84 | 0.75 | 0.73 | 0.88 | 0.82 |
| 3312: 223 | 1650 | 0.87 | 0.93 | 0.94 | 0.9 | 0.9 | 0.97 | NA | 0 | 0.78 | 0.86 | 0.82 | 0.79 | 0.82 | 0.81 |
| 3312: 242 | 1669 | 0.89 | 0.91 | 0.9 | 0.88 | 0.96 | 0.94 | NA | 0 | 0.93 | 0.87 | 0.86 | 1 | 0.91 | 0.92 |
| 3312: 259 | 1686 | 1 | 0.97 | 0.97 | 0.96 | 0.95 | 1 | 1 | 1 | 1 | 1 | 1 | 1 | 1 | 0.98 |
| 3312: 273 | 1700 | 0.85 | 0.97 | 0.89 | 0.94 | 0.91 | 1 | 0.56 | 1 | 0.91 | 0.84 | 0.93 | 0.74 | 0.84 | 0.9 |
| 3312: 314 | 1741 | 0.64 | 0.66 | 0.81 | 0.68 | 0.8 | 0.85 | 1 | 0.56 | 0.63 | 1 | 0.74 | 0.85 | 0.7 | 0.58 |
| 3312: 404 | 1831 | 0.72 | 1 | 0.79 | 1 | 0.8 | 0.75 | 1 | 0.42 | 0.81 | 0.7 | 1 | 0.63 | 0.59 | 1 |
| 3312: 412 | 1839 | 1 | 0.98 | 0.97 | 0.93 | 0.89 | 1 | NA | 0.88 | 1 | 1 | 1 | 1 | 0.97 | 1 |

| CpG identifier | MVP Position in ROI | Brain | Brain | Brain | Brain |
|---|---|---|---|---|---|
| 3312: 71 | 1498 | 1 | 1 | 1 | 1 |
| 3312: 95 | 1522 | 1 | 1 | 1 | 1 |
| 3312: 103 | 1530 | 1 | 1 | 1 | 1 |
| 3312: 119 | 1546 | 0.79 | 1 | 1 | 1 |
| 3312: 158 | 1585 | 0.88 | 1 | 0.91 | 0.93 |
| 3312: 167 | 1594 | 1 | 1 | 1 | 1 |
| 3312: 193 | 1620 | 0.66 | 0.81 | 0.83 | 0.79 |
| 3312: 215 | 1642 | 0.82 | 0.73 | 0.86 | 0.88 |
| 3312: 223 | 1650 | 0.77 | 0.95 | 0.9 | 0.92 |
| 3312: 242 | 1669 | 0.89 | 0.93 | 0.94 | 0.94 |
| 3312: 259 | 1686 | 1 | 1 | 1 | 0.97 |
| 3312: 273 | 1700 | 0.87 | 1 | 0.96 | 1 |
| 3312: 314 | 1741 | 0.85 | 0.69 | 0.68 | 0.71 |
| 3312: 404 | 1831 | 0.76 | 0.84 | 0.8 | 0.83 |
| 3312: 412 | 1839 | 0.96 | 1 | 1 | 1 |

[0319] TABLE 29
(3329):

| | MVP Position in | | | | | | | | | | | | |
|---|---|---|---|---|---|---|---|---|---|---|---|---|---|
| CpG identifier | ROI | Prostate | Prostate | Prostate | Prostate | Prostate | Prostate | Prostate | Prostate | Muscle | Muscle | Muscle | Muscle |
| 3329: 52 | 1151 | 1 | NA | 1 | NA | 1 | NA | NA | NA | 1 | NA | NA | NA |
| 3329: 135 | 1234 | 0.93 | 0.9 | 0.94 | 0.93 | 0.92 | 0.96 | 0.95 | 0.91 | 1 | NA | 0.67 | 1 |
| 3329: 154 | 1253 | 0.88 | 0.91 | 0.91 | 0.92 | 0.91 | 0.95 | 0.92 | 0.82 | 0.92 | 1 | 1 | 0.87 |
| 3329: 187 | 1286 | 0.9 | 1 | 1 | 0.92 | 0.96 | 0.96 | 0.99 | 0.92 | 0.93 | 1 | 0.8 | 0.95 |
| 3329: 241 | 1340 | 0.91 | 0.95 | 0.98 | 0.92 | 0.96 | 0.96 | 0.94 | 0.97 | 0.9 | 0.89 | 1 | 0.97 |
| 3329: 251 | 1350 | 1 | 1 | 0.96 | 0.98 | 0.98 | 1 | 1 | 0.97 | 0.99 | 1 | 0.9 | 1 |
| 3329: 303 | 1402 | 0.96 | 0.49 | 0.95 | 0.87 | 0.75 | 1 | 0.96 | 0.93 | 0.85 | NA | 0.88 | 0.67 |
| 3329: 315 | 1414 | 0.84 | 0.84 | 0.75 | 0.92 | 0.94 | 0.85 | 0.98 | 0.82 | 0.9 | 1 | 0.81 | 0.91 |
| 3329: 420 | 1519 | 0.27 | 0.4 | 0.37 | 0.48 | 0.48 | 0.36 | 0.36 | 0.18 | 0.45 | 0.57 | 0.35 | 0.53 |
| 3329: 440 | 1539 | 0.5 | 0.65 | 0.55 | 0.62 | 0.67 | 1 | 0.62 | 0.53 | 0.66 | NA | 1 | 0.57 |

| | MVP | | | | | | | | | | | | | | |
|---|---|---|---|---|---|---|---|---|---|---|---|---|---|---|---|
| CpG identifier | Position in ROI | Muscle | Lung | Lung | Lung | Lung | Lung | Liver | Liver | Breast | Breast | Breast | Breast | Breast | Breast |
| 3329: 52 | 1151 | NA | NA | NA | NA | 1 | 0.85 | 0.65 | NA | 0.83 | NA | NA | NA | 0.5 | NA |
| 3329: 135 | 1234 | 0.92 | 1 | 1 | 0.8 | 0.96 | 0.95 | 0.64 | 0 | 1 | 1 | 1 | 0.92 | 1 | 0.9 |
| 3329: 154 | 1253 | 0.84 | 0.85 | 0.84 | 0.91 | 0.94 | 0.92 | 0.55 | 0.13 | 0.94 | 0.82 | 0.9 | 0.92 | 0.91 | 0.92 |
| 3329: 187 | 1286 | 0.93 | 0.92 | 0.95 | 1 | 0.9 | 0.96 | 0.55 | 0.097 | 0.95 | 0.97 | 0.95 | 0.85 | 1 | 0.93 |
| 3329: 241 | 1340 | 0.97 | 0.98 | 1 | 1 | 1 | 0.96 | 0.57 | 0.17 | 0.95 | 1 | 0.95 | 1 | 0.94 | 0.97 |
| 3329: 251 | 1350 | 1 | 0.98 | 1 | 1 | 0.95 | 1 | 0.79 | 0.35 | 1 | 0.98 | 0.98 | 1 | 1 | 0.91 |
| 3329: 303 | 1402 | 0.87 | 0.95 | 0.92 | 0.72 | 1 | 0.95 | 0.32 | 0.079 | 0.91 | 0.98 | 0.9 | 1 | 0.97 | 0.82 |
| 3329: 315 | 1414 | 0.83 | 0.89 | 0.96 | 0.97 | 0.91 | 0.87 | 0.71 | 0.21 | 0.8 | 0.98 | 0.92 | 0.59 | 0.82 | 0.81 |
| 3329: 420 | 1519 | 0.35 | 0.33 | 0.46 | 0.39 | 0.44 | NA | 0.34 | 0.61 | 0.31 | 0.5 | 0.43 | 0.47 | 0.49 | 0.39 |
| 3329: 440 | 1539 | 0.56 | 0.62 | 0.67 | 0.63 | 0.72 | 0.56 | 0.65 | 0.87 | 0.61 | 0.59 | 1 | 0.69 | 0.59 | 0.64 |

| CpG identifier | MVP Position in ROI | Brain | Brain | Brain | Brain | Brain | Brain |
|---|---|---|---|---|---|---|---|
| 3329: 52 | 1151 | 1 | NA | NA | NA | NA | NA |
| 3329: 135 | 1234 | 1 | 0.93 | 0.91 | 1 | 1 | 1 |
| 3329: 154 | 1253 | 0.92 | 0.95 | 0.73 | 0.83 | 0.97 | 0.96 |
| 3329: 187 | 1286 | 1 | 1 | 1 | 1 | 1 | 1 |
| 3329: 241 | 1340 | 0.99 | 0.97 | 1 | 0.94 | 0.97 | 1 |
| 3329: 251 | 1350 | 1 | 1 | 0.77 | 1 | 1 | 1 |
| 3329: 303 | 1402 | 0.79 | 0.74 | 0.45 | 0.91 | 0.88 | 0.87 |
| 3329: 315 | 1414 | 1 | 0.95 | NA | 0.74 | 0.94 | 0.95 |
| 3329: 420 | 1519 | 0.48 | 0.49 | NA | 0.38 | 0.54 | 0.48 |
| 3329: 440 | 1539 | 0.75 | 0.72 | 0.22 | 0.72 | 0.76 | 0.64 |

[0320] TABLE 30
(3330):

| | MVP Position in | | | | | | | | | | | | |
|---|---|---|---|---|---|---|---|---|---|---|---|---|---|
| CpG identifier | ROI | Prostate | Prostate | Prostate | Prostate | Prostate | Prostate | Prostate | Prostate | Muscle | Muscle | Muscle | Muscle |
| 3330: 45 | 2033 | 0.9 | 0.7 | 0.85 | 0.96 | 0.94 | 0.84 | 0.9 | 0.96 | 1 | 1 | 1 | 1 |
| 3330: 127 | 2115 | 0.81 | 0.61 | 0.87 | 0.87 | 0.82 | 0.82 | 0.89 | 0.93 | 0.95 | 1 | 1 | 0.86 |
| 3330: 151 | 2139 | 0.22 | 0.2 | 0.44 | 0.45 | 0.35 | 0.41 | 0.37 | 0.41 | 0.3 | 0.37 | 0.47 | 0.37 |
| 3330: 251 | 2239 | 0.67 | 0.66 | 0.52 | 0.76 | 0.63 | 0.49 | 0.55 | 0.59 | 0.75 | 0.86 | 0.37 | 0.73 |
| 3330: 260 | 2248 | 0.68 | 0.35 | 0.62 | 0.82 | 0.8 | 0.74 | 0.74 | 0.82 | 0.84 | 0.91 | 0.8 | 0.94 |
| 3330: 265 | 2253 | 0.69 | 0.52 | 0.87 | 0.83 | 0.77 | 0.72 | 0.83 | 0.87 | 0.63 | 0.71 | 0.74 | 0.69 |
| 3330: 298 | 2286 | 0.87 | 0 | 0.61 | 0.81 | 0.73 | 0.68 | 0.7 | 0.75 | 0.71 | 0.83 | 0.97 | 0.81 |
| 3330: 311 | 2299 | 0.82 | 0.54 | 0.82 | 0.87 | 0.77 | 0.8 | 0.85 | 0.88 | 0.96 | 1 | 1 | 1 |
| 3330: 320 | 2308 | 0.76 | 0.54 | 0.81 | 0.88 | 0.86 | 0.84 | 0.76 | 0.89 | 0.95 | 0.93 | 1 | 0.91 |
| 3330: 394 | 2382 | 1 | 0 | 1 | 1 | 1 | 1 | 1 | 1 | 1 | 1 | 1 | 1 |
| 3330: 401 | 2389 | 1 | 0 | 0.57 | 1 | 1 | 0.37 | 0.58 | 1 | 1 | 1 | 1 | 0.74 |

| | MVP | | | | | | | | | | | | | | |
|---|---|---|---|---|---|---|---|---|---|---|---|---|---|---|---|
| CpG identifier | Position in ROI | Muscle | Lung | Lung | Lung | Lung | Lung | Liver | Liver | Breast | Breast | Breast | Breast | Breast | Breast |
| 3330: 45 | 2033 | 1 | 0.8 | 1 | 0 | 0.92 | 0.86 | 0.88 | 1 | 1 | 0.88 | 0.92 | 0.84 | 1 | 0.87 |
| 3330: 127 | 2115 | 0.97 | 0.81 | 0.77 | 0.74 | 0.82 | 0.92 | 0.83 | 1 | 1 | 0.92 | 0.94 | 1 | 0.96 | 0.88 |
| 3330: 151 | 2139 | 0.4 | 0.22 | 0.2 | 0 | 0.2 | 0.23 | 0.36 | 0.99 | 0.43 | 0.23 | 0.41 | 0.18 | 0.46 | 0.44 |
| 3330: 251 | 2239 | 0.74 | 0.53 | 0.66 | 0.31 | 0.52 | 0.64 | 0.51 | 0.7 | 0.57 | 0.55 | 0.76 | 0.72 | 0.68 | 0.58 |
| 3330: 260 | 2248 | 0.95 | 0.59 | 0.34 | 0 | 0.28 | 0.57 | 0.48 | 0.96 | 0.75 | 0.64 | 0.69 | 0.73 | 0.74 | 0.64 |
| 3330: 265 | 2253 | 0.71 | 0.59 | 0.52 | 0.8 | 0.61 | 0.6 | 0.48 | 0.83 | 0.83 | 0.63 | 0.82 | 0.34 | 0.87 | 0.58 |
| 3330: 298 | 2286 | 0.84 | 0.44 | 0.29 | 0.75 | 0.43 | 0.49 | 0.11 | 0.94 | 0.67 | 0.53 | 0.69 | 0.26 | 0.77 | 0.61 |
| 3330: 311 | 2299 | 1 | 0.7 | 0.35 | 0.78 | 0.63 | 0.73 | 0.66 | 0.94 | 0.97 | 0.8 | 0.86 | 0.85 | 0.94 | 0.78 |
| 3330: 320 | 2308 | 0.93 | 0.79 | 0.45 | 0.51 | 0.6 | 0.73 | 0.56 | 0.8 | 0.82 | 0.67 | 0.75 | 0.6 | 0.87 | 0.81 |
| 3330: 394 | 2382 | 1 | 0.67 | 0.3 | 0.5 | 0.81 | 0.88 | 1 | NA | 1 | 1 | 1 | 0.5 | 0.88 | 1 |
| 3330: 401 | 2389 | 1 | 1 | 0.5 | 0 | 0.5 | 1 | 0 | 0.62 | 0.44 | 1 | 1 | 0 | 1 | 1 |

| CpG identifier | MVP Position in ROI | Brain | Brain | Brain | Brain | Brain | Brain |
|---|---|---|---|---|---|---|---|
| 3330: 45 | 2033 | 1 | 1 | 1 | 0.86 | 1 | 1 |
| 3330: 127 | 2115 | 1 | 1 | 0.94 | 1 | 0.98 | 1 |
| 3330: 151 | 2139 | 0.23 | 0.41 | 1 | 0.6 | 0.49 | 0.58 |
| 3330: 251 | 2239 | 0.87 | 0.66 | 0.93 | 0.85 | 0.8 | 0.6 |
| 3330: 260 | 2248 | 1 | 0.87 | 1 | 0.58 | 0.89 | 0.86 |
| 3330: 265 | 2253 | 0.85 | 0.92 | 0.88 | 0.78 | 0.74 | 0.78 |
| 3330: 298 | 2286 | 0.93 | 0.8 | 1 | 0.71 | 0.77 | 0.79 |
| 3330: 311 | 2299 | 1 | 1 | 1 | 0.86 | 1 | 1 |
| 3330: 320 | 2308 | 1 | 1 | 0.048 | 0.81 | 1 | 0.93 |
| 3330: 394 | 2382 | 1 | 1 | 1 | 1 | 1 | 1 |
| 3330: 401 | 2389 | 1 | 1 | 1 | 1 | 1 | NA |

[0321] TABLE 31
(3347):

| | MVP | | | | | | | | | | | | |
|---|---|---|---|---|---|---|---|---|---|---|---|---|---|
| | Position | | | | | | | | | | | | |
| CpG | in | | | | | | | | | | | | |
| identifier | ROI | Prostate | Prostate | Prostate | Prostate | Prostate | Prostate | Prostate | Prostate | Muscle | Muscle | Muscle | Muscle |
| 3347: 32 | 1907 | 0.64 | 0.46 | NA | 0.042 | 0.21 | 0 | 1 | NA | 0 | 0 | 0 | NA |
| 3347: 63 | 1938 | 0.71 | 0.82 | 0.38 | 0.65 | 0.8 | 0.81 | 0.88 | 0.63 | 0.26 | 0.16 | 0 | 0.56 |
| 3347: 65 | 1940 | 0.61 | 0.7 | 0.42 | 0.4 | 0.88 | 0.66 | 0.65 | 0.52 | 0.099 | 0 | 0 | 0.14 |
| 3347: 71 | 1946 | NA | 0.12 | NA | 0.41 | 0.62 | NA | 0.63 | 0.45 | NA | NA | 0 | 0.75 |
| 3347: 85 | 1960 | 0.53 | 0.095 | 0.5 | 0.31 | 0.43 | 0.71 | 0.88 | 0.0054 | 0 | 0 | 0.011 | NA |
| 3347: 92 | 1967 | 0.37 | 0.3 | 0.13 | 0.14 | 0.38 | 0.52 | 0.75 | 0.064 | 0 | 0 | 0 | 0 |
| 3347: 100 | 1975 | 0.64 | 0.31 | 0.083 | 0.3 | 0.13 | 0.2 | 0.53 | NA | 0 | 0 | 0 | 0.21 |
| 3347: 103 | 1978 | 0.62 | 0.57 | 0.7 | 0.49 | 0.68 | 0.83 | 0.96 | 0.9 | 0 | 0 | 0.16 | 0 |
| 3347: 105 | 1980 | 0.76 | 0.21 | 0.45 | 0.2 | 0.19 | 0.84 | 1 | NA | 0 | 0 | 0 | 0.075 |
| 3347: 111 | 1986 | 0.22 | 0.37 | 0.4 | 0.099 | 0.1 | 0.33 | 0.64 | 0.038 | 0.046 | 0.72 | 0 | 0 |
| 3347: 127 | 2002 | 0.31 | 0.5 | 0.33 | 0.61 | 0.53 | 0.54 | 0.52 | 0.43 | 0.16 | 0 | 0 | 0.39 |
| 3347: 133 | 2008 | 0.5 | 0.5 | 0.47 | 0.58 | 0.63 | 0.51 | 0.34 | 0.41 | 0.39 | 0 | 0.33 | 0.3 |
| 3347: 185 | 2060 | 0.64 | 0.76 | 0.67 | 0.81 | 0.82 | 0.91 | 0.63 | 0.63 | 0.23 | 0 | 0.43 | 0.56 |
| 3347: 232 | 2107 | 0.86 | 0.89 | 0.79 | 0.93 | 0.91 | 0.92 | 1 | 0.88 | 0.82 | 1 | 0.65 | 0.73 |
| 3347: 342 | 2217 | 0.24 | 0.4 | 0.27 | 0.47 | 0.34 | 0.7 | 0.55 | 0 | 0.24 | 0 | 0.21 | 0.27 |
| 3347: 351 | 2226 | 0.77 | 0.62 | 0.67 | 0.64 | 0.66 | 0.56 | 1 | NA | 0.5 | 0.65 | 0.58 | 0.52 |

| | MVP | | | | | | | | | | | | | | |
|---|---|---|---|---|---|---|---|---|---|---|---|---|---|---|---|
| CpG | Position | | | | | | | | | | | | | | |
| identifier | in ROI | Muscle | Lung | Lung | Lung | Lung | Lung | Liver | Breast | Breast | Breast | Breast | Breast | Brain | Brain |
| 3347: 32 | 1907 | 0 | 0.041 | NA | 0 | 0.32 | NA | 0.4 | 0 | NA | 0.29 | 0 | 1 | 0 | 0 |
| 3347: 63 | 1938 | 0.55 | 0.56 | 0.64 | 0.6 | 0.76 | 0.83 | 0.82 | 0.88 | 0.95 | 0.75 | NA | 0.76 | 0.27 | 0 |
| 3347: 65 | 1940 | 0.25 | 0.075 | 0.13 | 0.94 | 0.69 | 0 | 0.054 | 0.68 | 0.66 | 0.13 | 0.034 | 0.45 | 0.29 | 0.23 |
| 3347: 71 | 1946 | 0.88 | 0.39 | 0.67 | 1 | 0.64 | 0.27 | 0.58 | 0.73 | 0.72 | 0.62 | 0 | 0.54 | 0.39 | NA |
| 3347: 85 | 1960 | 0.19 | 0.27 | 0.05 | 0 | 0.13 | 0.065 | 0 | 0 | 0.12 | 0.21 | 0 | 0.17 | 0 | 0.16 |
| 3347: 92 | 1967 | NA | 0.18 | 0.033 | 0.48 | 0.17 | 0.37 | NA | 0 | 0.66 | 0.062 | 0 | NA | 0 | 0 |
| 3347: 100 | 1975 | 0 | 0.27 | 0.75 | 1 | 0.61 | 0.41 | 0.8 | 0.25 | 0.28 | 0.077 | 0 | 0.4 | 0.091 | 0.1 |
| 3347: 103 | 1978 | 0.45 | NA | 0.66 | 0.71 | 0.56 | 0.2 | 0.88 | 0.73 | 0.47 | 0.37 | 0.27 | 0.51 | 0.19 | 0.13 |
| 3347: 105 | 1980 | 0.49 | 0.59 | 0.83 | 0.29 | 0.76 | 0.7 | 0.95 | 0.61 | 0.81 | 0.43 | 0.039 | 0.55 | 0.28 | 0.29 |
| 3347: 111 | 1986 | 0.21 | 0.053 | 0.71 | 1 | 0.57 | 0.26 | 0.63 | 0.087 | 0.68 | 0.082 | 0.11 | 0.31 | 0.071 | 0.076 |
| 3347: 127 | 2002 | 0.32 | 0.32 | 0.9 | 0.67 | 0.48 | 0.78 | 0.93 | 0.65 | 0.76 | 0.53 | 0.085 | 0.41 | 0.12 | 0 |
| 3347: 133 | 2008 | 0.25 | 0.16 | 0.77 | 0.95 | 0.7 | 0.65 | 0.8 | 0.61 | 0.79 | 0.61 | 0 | 0.43 | 0.092 | 0.95 |
| 3347: 185 | 2060 | 0.39 | 0.68 | 1 | 1 | 0.88 | 1 | 0.91 | 0.85 | 0.93 | 0.74 | 0.89 | 0.49 | 0.51 | 0.95 |
| 3347: 232 | 2107 | 0.82 | 0.79 | 0.85 | 0.98 | 0.97 | 0.98 | 0.93 | 0.89 | 0.99 | 0.87 | 1 | 0.95 | 0.81 | 0.97 |
| 3347: 342 | 2217 | 0.28 | 0.19 | 0.66 | 0.65 | 0.46 | 0.54 | 0.5 | 0.41 | 0.8 | 0.51 | 1 | 0.28 | 0.2 | 0.0077 |
| 3347: 351 | 2226 | 0.56 | 0.49 | 0.85 | 0.84 | 0.75 | 0.88 | 0.57 | 1 | 0.87 | 0.66 | NA | 0.39 | 0.51 | 0.76 |

| | MVP | | | |
|---|---|---|---|---|
| CpG | Position in | | | |
| identifier | ROI | Brain | Brain | Brain |
| 3347: 32 | 1907 | NA | 0.25 | 1 |
| 3347: 63 | 1938 | 1 | 0.35 | 0.64 |
| 3347: 65 | 1940 | 0.55 | 0.5 | 0.28 |
| 3347: 71 | 1946 | 1 | 0.39 | 0.67 |
| 3347: 85 | 1960 | 0 | 0 | 0 |
| 3347: 92 | 1967 | 0.095 | 0 | 0.067 |
| 3347: 100 | 1975 | 0.54 | 0.17 | 0.35 |
| 3347: 103 | 1978 | 0.86 | 0.39 | 0.5 |
| 3347: 105 | 1980 | 0.47 | 0.43 | 0.34 |
| 3347: 111 | 1986 | 0 | 0 | 0.11 |
| 3347: 127 | 2002 | 0.85 | 0.44 | 0.15 |
| 3347: 133 | 2008 | 0.5 | 0.4 | 0.13 |
| 3347: 185 | 2060 | 0.82 | 0.56 | 0.55 |
| 3347: 232 | 2107 | 1 | 0.63 | 0.72 |
| 3347: 342 | 2217 | 0.43 | 0.15 | 0.052 |
| 3347: 351 | 2226 | 0.41 | 0.46 | 0.27 |

[0322] TABLE 32
(3348):

| | MVP | | | | | | | | | | | | |
|---|---|---|---|---|---|---|---|---|---|---|---|---|---|
| | Position | | | | | | | | | | | | |
| CpG | in | | | | | | | | | | | | |
| identifier | ROI | Prostate | Prostate | Prostate | Prostate | Prostate | Prostate | Prostate | Prostate | Muscle | Muscle | Muscle | Muscle |
| 3348: 95 | 1651 | 1 | 1 | 0.93 | 1 | 0.92 | 0.95 | 0.99 | 1 | 0.96 | 1 | 0.54 | 0.96 |
| 3348: 112 | 1668 | 1 | 0.98 | 1 | 1 | 1 | 0.82 | 1 | 0.5 | 0.88 | 1 | 0 | 0.94 |
| 3348: 131 | 1687 | 0.98 | 1 | 1 | 1 | 1 | 0.93 | 1 | 0.61 | 0.97 | 0 | 1 | 1 |
| 3348: 154 | 1710 | 0.96 | 1 | 1 | 1 | 1 | 0.97 | 1 | 0.51 | 1 | 0.84 | 0.68 | 1 |
| 3348: 347 | 1903 | 1 | 1 | 1 | 1 | 1 | 1 | 1 | 1 | 0.87 | 1 | 1 | 0.85 |
| 3348: 352 | 1908 | 1 | 1 | 1 | 1 | 1 | 1 | 1 | 1 | 1 | 1 | 1 | 1 |
| 3348: 355 | 1911 | 0.96 | 1 | 1 | 1 | 1 | 1 | 1 | 1 | 0.84 | 0.98 | 1 | 0.81 |
| 3348: 361 | 1917 | 1 | 1 | 1 | 1 | 1 | 0.96 | 1 | 1 | 0.94 | 1 | 0.12 | 0.83 |
| 3348: 370 | 1926 | 1 | 1 | 1 | 1 | 1 | 1 | 1 | 1 | 0.99 | 1 | 1 | 0.97 |
| 3348: 397 | 1953 | 0.92 | 0.97 | 0.84 | 0.92 | 0.92 | 0.72 | 0.87 | 0.89 | 0.72 | 0.34 | 0 | 0.73 |
| 3348: 439 | 1995 | 0.8 | 1 | 0.67 | 0.93 | 0.97 | 0.91 | 0.95 | 1 | 0.33 | 0 | 1 | 0.56 |
| 3348: 445 | 2001 | 1 | 1 | 1 | 1 | 1 | 1 | 1 | 1 | 1 | 1 | 1 | 1 |

| | MVP | | | | | | | | | | | | | | |
|---|---|---|---|---|---|---|---|---|---|---|---|---|---|---|---|
| CpG | Position | | | | | | | | | | | | | | |
| identifier | in ROI | Muscle | Lung | Lung | Lung | Lung | Lung | Liver | Breast | Breast | Breast | Breast | Breast | Breast | Brain |
| 3348: 95 | 1651 | 0.93 | 0.95 | 1 | 1 | 1 | 1 | 0.56 | 0.88 | 0.86 | 0.84 | 0.87 | 1 | 1 | 1 |
| 3348: 112 | 1668 | 1 | 0.96 | 0.94 | 1 | 1 | 1 | 0.73 | 0.86 | 0.96 | 1 | 0.92 | 1 | 1 | 1 |
| 3348: 131 | 1687 | 0.94 | 1 | 1 | 0.93 | 0.97 | 1 | 0.51 | 0.89 | 0.96 | 0.93 | 0.98 | 1 | 1 | 1 |
| 3348: 154 | 1710 | 1 | 1 | 0.8 | 1 | 1 | 1 | 0.56 | 0.98 | 1 | 1 | 1 | 0.66 | 0.92 | 1 |
| 3348: 347 | 1903 | 0.83 | 1 | 1 | 1 | 1 | 1 | 0.49 | 0.94 | 1 | 0.9 | 1 | 0.88 | 0.6 | 1 |
| 3348: 352 | 1908 | 1 | 1 | 1 | 1 | 1 | 1 | 0.84 | 1 | 1 | 1 | 1 | 1 | 1 | 1 |
| 3348: 355 | 1911 | 0.88 | 1 | 1 | 1 | 1 | 1 | 0.66 | 0.97 | 0.96 | 0.95 | 1 | 0.91 | 1 | 1 |
| 3348: 361 | 1917 | 0.95 | 1 | 1 | 1 | 1 | 1 | 0.6 | 0.98 | 0.96 | 0.91 | 0.96 | 1 | 1 | 1 |
| 3348: 370 | 1926 | 1 | 1 | 1 | 1 | 1 | 1 | 0.51 | 1 | 1 | 1 | 1 | 0.73 | 1 | 1 |
| 3348: 397 | 1953 | 0.69 | 0.91 | 1 | 0.92 | 0.98 | 1 | 0.41 | 0.91 | 0.93 | 1 | 0.94 | 1 | 1 | 0.91 |
| 3348: 439 | 1995 | 0.42 | 0.92 | NA | 0.94 | 0.66 | 1 | 0.5 | 0.47 | 0.55 | 0.65 | 0.76 | 1 | 0.63 | 1 |
| 3348: 445 | 2001 | 1 | 1 | NA | 1 | 1 | 1 | 0.86 | 1 | 1 | 1 | 1 | 1 | 1 | 1 |

| CpG | MVP | | | | |
|---|---|---|---|---|---|
| identifier | Position in ROI | Brain | Brain | Brain | Brain |
| 3348: 95 | 1651 | 1 | 1 | 1 | 1 |
| 3348: 112 | 1668 | 0.89 | 1 | 1 | 1 |
| 3348: 131 | 1687 | 1 | 1 | 1 | 1 |
| 3348: 154 | 1710 | 0.8 | 0.81 | 1 | 1 |
| 3348: 347 | 1903 | 0.97 | 1 | 1 | 1 |
| 3348: 352 | 1908 | 1 | 1 | 1 | 1 |
| 3348: 355 | 1911 | 0.97 | 1 | 1 | 1 |
| 3348: 361 | 1917 | 1 | 1 | 1 | 1 |
| 3348: 370 | 1926 | 1 | 1 | 1 | 1 |
| 3348: 397 | 1953 | 1 | 1 | 0.92 | 0.9 |
| 3348: 439 | 1995 | 1 | 1 | 1 | 0.96 |
| 3348: 445 | 2001 | 1 | 1 | 1 | 1 |

[0323] TABLE 33
(3364):

| | MVP | | | | | | | | | | | | |
|---|---|---|---|---|---|---|---|---|---|---|---|---|---|
| | Position | | | | | | | | | | | | |
| CpG | in | | | | | | | | | | | | |
| identifier | ROI | Prostate | Prostate | Prostate | Prostate | Prostate | Prostate | Prostate | Prostate | Muscle | Muscle | Muscle | Muscle |
| 3364: 33 | 1921 | 0.87 | 1 | 0.73 | 0.9 | 1 | 1 | NA | 0.88 | 0.89 | NA | 1 | NA |
| 3364: 117 | 2005 | 0.62 | 0.78 | 1 | 0.78 | 0.8 | 0.93 | 1 | 0.78 | 1 | 1 | 1 | 1 |
| 3364: 142 | 2030 | 0.62 | 0.91 | 0.79 | 0.93 | 0.89 | 1 | 1 | 0.8 | 0.78 | 1 | 1 | 0.74 |
| 3364: 163 | 2051 | 0.84 | 0.95 | 1 | 1 | 1 | 1 | 1 | 1 | 1 | 1 | 1 | 1 |
| 3364: 168 | 2056 | 0.72 | 0.95 | 0.82 | 0.95 | 1 | 1 | 0.92 | 1 | 1 | 1 | 1 | 1 |
| 3364: 204 | 2092 | 0.76 | 0.9 | NA | 0.9 | NA | 0.88 | 0.95 | 0.56 | 0.57 | 0.91 | 0.98 | NA |
| 3364: 251 | 2139 | 0.54 | 0.7 | 0.61 | 0.81 | 0.62 | 0.7 | 0.75 | 0.56 | 0.45 | 0.45 | 0.6 | 0.62 |
| 3364: 423 | 2311 | 0.86 | NA | 1 | 1 | NA | 1 | 1 | 1 | 1 | 1 | 1 | NA |
| 3364: 431 | 2319 | 0.77 | NA | 0.73 | 1 | 1 | 1 | 0.91 | 1 | 0.59 | 1 | 0.93 | 1 |
| 3364: 445 | 2333 | 0.73 | NA | NA | 1 | 1 | 1 | 1 | 0.82 | 0.81 | 1 | 1 | 1 |
| 3364: 471 | 2359 | NA | NA | 0.51 | 1 | NA | 1 | NA | 0 | NA | 1 | 0.5 | 0 |
| 3364: 474 | 2362 | NA | NA | NA | 1 | NA | NA | NA | 0.85 | 0.37 | 1 | 1 | 0.72 |

| | MVP | | | | | | | | | | | | | | |
|---|---|---|---|---|---|---|---|---|---|---|---|---|---|---|---|
| CpG | Position | | | | | | | | | | | | | | |
| identifier | in ROI | Lung | Lung | Lung | Lung | Lung | Liver | Liver | Breast | Breast | Breast | Breast | Breast | Brain | Brain |
| 3364: 33 | 1921 | 1 | NA | NA | 0.87 | NA | NA | NA | NA | NA | 1 | NA | NA | 0.21 | NA |
| 3364: 117 | 2005 | 1 | 1 | 1 | 0.96 | 1 | 1 | 1 | 1 | 1 | 1 | 1 | 0.93 | 1 | NA |
| 3364: 142 | 2030 | 1 | 1 | 1 | 1 | 0.5 | 1 | 1 | 0.95 | 0.93 | 1 | 0.93 | 0.98 | 0.64 | 0.11 |
| 3364: 163 | 2051 | 1 | 1 | 1 | 1 | 1 | 1 | 1 | 1 | 1 | 1 | 1 | 1 | 0.83 | 0.062 |
| 3364: 168 | 2056 | 1 | 1 | 1 | 1 | 1 | 1 | 1 | 1 | 1 | 1 | 1 | 0.92 | 0.76 | 0.63 |
| 3364: 204 | 2092 | 0.79 | 0.84 | 0.85 | 0.83 | 1 | 1 | 1 | 1 | 0.93 | 0.85 | 0.4 | 0.96 | 0.45 | 0 |
| 3364: 251 | 2139 | 0.68 | 0.85 | 0.89 | 0.79 | 0.95 | 1 | NA | 0.66 | 0.65 | 0.64 | 0.86 | 0.63 | 0.44 | 0.46 |
| 3364: 423 | 2311 | 1 | 1 | 1 | 1 | NA | NA | NA | 1 | 1 | 1 | 1 | 1 | 0.74 | NA |
| 3364: 431 | 2319 | 0.8 | 1 | 0.64 | 0.95 | 1 | NA | NA | 1 | 0.85 | 0.89 | 0.68 | 1 | 0.45 | NA |
| 3364: 445 | 2333 | 1 | 1 | 1 | NA | 0.82 | NA | NA | 1 | 1 | 0.92 | 1 | 0.93 | 0.73 | NA |
| 3364: 471 | 2359 | 1 | 1 | 1 | 0 | NA | NA | NA | 1 | 1 | 1 | 1 | 1 | 1 | NA |
| 3364: 474 | 2362 | 1 | 1 | 1 | 1 | NA | NA | NA | NA | 1 | 1 | 1 | 1 | 1 | NA |

| | MVP | | | |
|---|---|---|---|---|
| CpG identifier | Position in ROI | Brain | Brain | Brain |
| 3364: 33 | 1921 | NA | NA | 0.59 |
| 3364: 117 | 2005 | 1 | 0.79 | 0.8 |
| 3364: 142 | 2030 | 0.93 | 0.43 | 0.48 |
| 3364: 163 | 2051 | 0.75 | 0.61 | 0.72 |
| 3364: 168 | 2056 | 0.93 | 0.55 | 0.61 |
| 3364: 204 | 2092 | 1 | 0.44 | 0.33 |
| 3364: 251 | 2139 | 0.58 | 0.47 | 0.48 |
| 3364: 423 | 2311 | NA | 0.88 | NA |
| 3364: 431 | 2319 | NA | 0.55 | 1 |
| 3364: 445 | 2333 | 0.74 | 0.73 | 0.64 |
| 3364: 471 | 2359 | 0.49 | 0.16 | NA |
| 3364: 474 | 2362 | NA | 0.65 | NA |

[0324] TABLE 34
(3374):

| | MVP | | | | | | | | | | | | |
|---|---|---|---|---|---|---|---|---|---|---|---|---|---|
| | Position | | | | | | | | | | | | |
| CpG | in | | | | | | | | | | | | |
| identifier | ROI | Prostate | Prostate | Prostate | Prostate | Prostate | Prostate | Prostate | Prostate | Muscle | Muscle | Muscle | Muscle |
| 3374: 38 | 979 | 0.82 | 0.88 | 0.46 | 0.73 | 0.56 | 0 | 0.62 | 0.73 | 0.36 | 0.54 | 0.64 | 0.22 |
| 3374: 89 | 1030 | 0.91 | 1 | 0.81 | 0.71 | 0.83 | 0.89 | 0.89 | 0.9 | 0.55 | 0.48 | 0.75 | 0.51 |
| 3374: 98 | 1039 | 1 | 1 | 1 | 0.99 | 1 | 0.98 | 1 | 1 | 0.97 | 0.98 | 0.83 | 1 |
| 3374: 117 | 1058 | 0.89 | 0.98 | 1 | 0.97 | 0.98 | 0.93 | 0.96 | 0.94 | 0.88 | 0.47 | 0.93 | 0.92 |
| 3374: 238 | 1179 | 0.98 | 1 | 1 | 1 | 1 | 1 | 1 | 1 | 1 | 1 | 1 | 0.96 |
| 3374: 255 | 1196 | 1 | 1 | 1 | 1 | 0.98 | 1 | 1 | 1 | 1 | 1 | 1 | 1 |
| 3374: 280 | 1221 | 1 | 0.98 | 1 | 1 | 0.98 | 0.98 | 1 | 1 | 0.98 | 0.98 | 1 | 0.95 |
| 3374: 309 | 1250 | 0.83 | 0.93 | 0.83 | 0.87 | 0.79 | 0.58 | 0.75 | 0.93 | 0.81 | 1 | 0.72 | 0.84 |
| 3374: 350 | 1291 | 0.95 | 1 | 0.89 | 0.92 | 0.85 | 0.92 | 0.94 | 1 | 0.93 | 0.68 | 0.96 | 0.91 |
| 3374: 449 | 1390 | 0.87 | 0.74 | 0.76 | 0.64 | 0.65 | 0.52 | 0.71 | 0.84 | 0.57 | 0.87 | 1 | 0.7 |

| CpG | MVP | | | | | | | | | | | | | |
|---|---|---|---|---|---|---|---|---|---|---|---|---|---|---|
| identifier | Position in ROI | Muscle | Lung | Lung | Lung | Lung | Lung | Liver | Liver | Breast | Breast | Breast | Breast | Breast |
| 3374: 38 | 979 | 0.49 | 0.55 | 0.85 | 1 | 0.76 | 0.87 | 0.87 | 0.44 | 0.59 | 0.55 | 0.2 | 0.18 | 0.49 |
| 3374: 89 | 1030 | 0.58 | 0.79 | 0.94 | 0.65 | 0.81 | 0.86 | 0.94 | 1 | 0.65 | 0.77 | 0.69 | 0.77 | 0.65 |
| 3374: 98 | 1039 | 1 | 1 | 1 | 0.86 | 1 | 1 | 1 | 1 | 0.97 | 1 | 0.99 | 0.68 | 0.98 |
| 3374: 117 | 1058 | 0.91 | 0.93 | 0.99 | 1 | 0.96 | 0.96 | 0.94 | 1 | 0.92 | 0.93 | 0.96 | 0.88 | 0.89 |
| 3374: 238 | 1179 | 1 | 1 | 1 | 1 | 1 | 1 | 0.99 | 1 | 1 | 1 | 1 | 1 | 1 |
| 3374: 255 | 1196 | 1 | 1 | 1 | 1 | 1 | 1 | 1 | 1 | 1 | 1 | 1 | 1 | 1 |
| 3374: 280 | 1221 | 0.99 | 1 | 0.98 | 1 | 1 | 1 | 1 | 1 | 0.96 | 1 | 1 | 1 | 0.98 |
| 3374: 309 | 1250 | 0.76 | 0.89 | 0.9 | 0.64 | 0.9 | 0.91 | 0.98 | 0.73 | 0.65 | 0.68 | 0.77 | 0.54 | 0.71 |
| 3374: 350 | 1291 | 0.92 | 0.93 | 0.97 | 0.97 | 0.95 | 0.99 | 0.93 | 0.88 | 0.91 | 0.95 | 0.88 | 0.98 | 0.84 |
| 3374: 449 | 1390 | 0.72 | 0.89 | 0.92 | 0.97 | 0.85 | 1 | 0.9 | 0.82 | 0.95 | 1 | 0.85 | 0.39 | 0.86 |

| | MVP | | | | | |
|---|---|---|---|---|---|---|
| CpG | Position in | | | | | |
| identifier | ROI | Brain | Brain | Brain | Brain | Brain |
| 3374: 38 | 979 | 0.9 | 1 | 1 | 0.92 | 0.76 |
| 3374: 89 | 1030 | 0.9 | 0.94 | 0.88 | 0.84 | 1 |
| 3374: 98 | 1039 | 1 | 0.97 | 1 | 1 | 1 |
| 3374: 117 | 1058 | 0.93 | 1 | 1 | 0.96 | 0.91 |
| 3374: 238 | 1179 | 1 | 0.96 | 1 | 1 | 1 |
| 3374: 255 | 1196 | 1 | 1 | 1 | 1 | 1 |
| 3374: 280 | 1221 | 1 | 1 | 1 | 0.97 | 1 |
| 3374: 309 | 1250 | 0.95 | 0.76 | 0.39 | 0.9 | 0.83 |
| 3374: 350 | 1291 | 1 | 0.87 | 1 | 0.99 | 0.97 |
| 3374: 449 | 1390 | 0.92 | 0.88 | 0.88 | 0.78 | 0.74 |

[0325] TABLE 35
(3377):

| | MVP | | | | | | | | | | | | |
|---|---|---|---|---|---|---|---|---|---|---|---|---|---|
| | Position | | | | | | | | | | | | |
| CpG | in | | | | | | | | | | | | |
| identifier | ROI | Prostate | Prostate | Prostate | Prostate | Prostate | Prostate | Prostate | Prostate | Muscle | Muscle | Muscle | Muscle |
| 3377: 30 | 2036 | NA | NA | NA | NA | NA | NA | NA | NA | NA | NA | NA | NA |
| 3377: 83 | 2089 | 1 | 1 | 1 | 1 | 1 | 1 | 1 | 1 | 1 | 0.93 | 1 | 1 |
| 3377: 109 | 2115 | 0.88 | 1 | 1 | 1 | 1 | 1 | 1 | 1 | 0.96 | 1 | 0.87 | 0.86 |
| 3377: 183 | 2189 | 0.79 | 0.81 | 0.72 | 0.78 | 0.75 | 0.74 | 0.79 | 0.77 | 0.74 | 1 | 0.85 | 0.68 |
| 3377: 222 | 2228 | 0.77 | 0.79 | 0.67 | 0.62 | 0.78 | 0.72 | 0.75 | 0.65 | 0.7 | 0.9 | 0.65 | 0.88 |
| 3377: 235 | 2241 | 0.96 | 1 | 1 | 1 | 1 | 1 | 1 | 0.98 | 1 | 0.68 | 0.84 | 1 |
| 3377: 261 | 2267 | 1 | 1 | 1 | 1 | 0.97 | 1 | 1 | 1 | 0.9 | 0.85 | 0.89 | 1 |
| 3377: 270 | 2276 | 0.86 | 0.94 | 1 | 1 | 0.96 | 0.91 | 1 | 1 | 0.8 | 1 | 0.77 | 1 |
| 3377: 272 | 2278 | 1 | 0.97 | 0.91 | 0.96 | 1 | 0.97 | 1 | 0.93 | 0.89 | 0.75 | 1 | 0.92 |
| 3377: 275 | 2281 | 0.82 | 0.84 | 0.42 | 0.74 | 0.35 | 0.78 | 0.85 | 0.8 | 0.7 | 1 | 0.85 | 0.77 |
| 3377: 327 | 2333 | 0.34 | 0.39 | 0.45 | 0.3 | 0.33 | 0.42 | 0.4 | 0.45 | 0.31 | 0.45 | 0.21 | 0.24 |

| CpG | MVP | | | | | | | | | | | | | |
|---|---|---|---|---|---|---|---|---|---|---|---|---|---|---|
| identifier | Position in ROI | Muscle | Lung | Lung | Lung | Lung | Lung | Liver | Liver | Breast | Breast | Breast | Breast | Breast |
| 3377: 30 | 2036 | NA | NA | NA | NA | NA | NA | NA | 0 | NA | NA | NA | NA | NA |
| 3377: 83 | 2089 | 1 | 1 | 1 | 1 | 1 | 1 | 1 | 0.82 | 1 | 1 | 1 | 0.7 | 1 |
| 3377: 109 | 2115 | 1 | 1 | 1 | 1 | 1 | 1 | 1 | 1 | 1 | 1 | 1 | 0.75 | 1 |
| 3377: 183 | 2189 | 0.68 | 0.81 | 0.93 | 0.84 | 0.79 | 0.86 | 0.95 | 0.7 | 0.65 | 0.73 | 0.68 | 1 | 0.74 |
| 3377: 222 | 2228 | 0.82 | 0.8 | 0.84 | 0.81 | 0.8 | 0.81 | 1 | 1 | 0.61 | 0.71 | 0.62 | 0.84 | 0.68 |
| 3377: 235 | 2241 | 1 | 1 | 1 | 1 | 1 | 1 | 1 | 0.95 | 0.95 | 1 | 0.96 | 0.85 | 0.96 |
| 3377: 261 | 2267 | 1 | 0.95 | 1 | 1 | 1 | 1 | 1 | 0.64 | 0.89 | 0.95 | 0.83 | 1 | 0.94 |
| 3377: 270 | 2276 | 0.89 | 0.92 | 1 | 0.96 | 1 | 0.89 | 0.96 | 1 | 0.89 | 0.77 | 0.78 | 0.96 | 0.84 |
| 3377: 272 | 2278 | 0.88 | 0.95 | 0.96 | 1 | 0.97 | 1 | 1 | 1 | 0.79 | 0.7 | 0.74 | 1 | 0.68 |
| 3377: 275 | 2281 | 0.43 | 0.52 | 0.8 | 0.47 | 0.84 | 0.89 | 0.5 | 0.89 | 0.39 | 0.55 | 0.22 | 0.47 | 0.24 |
| 3377: 327 | 2333 | 0.2 | 0.46 | 0.41 | 0.34 | 0.33 | 0.68 | 0.58 | 0.23 | 0.17 | 0.34 | 0.23 | 0.22 | 0.47 |

| | MVP | | | | | |
|---|---|---|---|---|---|---|
| CpG | Position in | | | | | |
| identifier | ROI | Brain | Brain | Brain | Brain | Brain |
| 3377: 30 | 2036 | NA | NA | NA | NA | NA |
| 3377: 83 | 2089 | 1 | 1 | 1 | 1 | 1 |
| 3377: 109 | 2115 | 1 | 1 | 0.78 | 1 | 0.93 |
| 3377: 183 | 2189 | 0.82 | 0.81 | 0.67 | 0.79 | 0.76 |
| 3377: 222 | 2228 | 0.75 | 1 | 1 | 0.7 | 0.68 |
| 3377: 235 | 2241 | 1 | 0.87 | 1 | 1 | 1 |
| 3377: 261 | 2267 | 0.93 | 1 | 0.89 | 0.92 | 0.94 |
| 3377: 270 | 2276 | 0.9 | 0.92 | 1 | 0.96 | 0.88 |
| 3377: 272 | 2278 | 0.92 | 0.77 | 1 | 0.97 | 1 |
| 3377: 275 | 2281 | 0.89 | 1 | 1 | 0.41 | 0.8 |
| 3377: 327 | 2333 | 0.6 | 0.21 | 0.42 | 0.34 | 0.59 |

[0326] TABLE 36
(3282):

| | MVP | | | | | | | | | | | | |
|---|---|---|---|---|---|---|---|---|---|---|---|---|---|
| | Position | | | | | | | | | | | | |
| CpG | in | | | | | | | | | | | | |
| identifier | ROI | Prostate | Prostate | Prostate | Prostate | Prostate | Prostate | Prostate | Prostate | Muscle | Muscle | Muscle | Muscle |
| 3382: 33 | 1224 | 0.6 | 0.63 | 0.7 | 0.66 | 0.66 | 0.5 | 0.85 | 0.51 | 0.55 | 0.84 | 0.7 | 0.71 |
| 3382: 42 | 1233 | 0.85 | 0.84 | 0.87 | 0.84 | 1 | 0.92 | 0.93 | 0.88 | 0.91 | 0.93 | 0.76 | 0.77 |
| 3382: 63 | 1254 | 0.8 | 0.89 | 0.79 | 0.88 | 0.78 | 0.85 | 0.86 | 0.76 | 0.83 | 0.58 | 0.7 | 0.71 |
| 3382: 231 | 1422 | 0.78 | 0.61 | 0.78 | 0.76 | 0.54 | 0.88 | 0.79 | 0.54 | 0.45 | 0.51 | 0.48 | 0.47 |
| 3382: 248 | 1439 | 0.67 | 0.8 | 0.71 | 0.66 | 0.68 | 0.84 | 0.73 | 0.62 | 0.51 | 0.72 | 0.61 | 0.8 |
| 3382: 257 | 1448 | 0.97 | 0.96 | 0.91 | 0.98 | 0.91 | 0.98 | 0.98 | 0.92 | 0.93 | 0.99 | 0.94 | 1 |
| 3382: 263 | 1454 | 0.84 | 0.8 | 0.86 | 0.8 | 0.79 | 0.76 | 0.83 | 0.7 | 0.66 | 0.74 | 0.67 | 0.66 |
| 3382: 284 | 1475 | 1 | 1 | 0.96 | 1 | 0.91 | 0.87 | 0.96 | 0.93 | 0.97 | 0.98 | 0.91 | 0.94 |
| 3382: 302 | 1493 | 1 | 1 | 0.94 | 1 | 0.96 | 0.99 | 1 | 1 | 0.96 | 0.93 | 1 | 0.96 |
| 3382: 308 | 1499 | 0.9 | 0.91 | 0.82 | 0.87 | 0.9 | 0.9 | 0.94 | 0.9 | 0.84 | 0.74 | 0.82 | 0.85 |
| 3382: 314 | 1505 | 0.96 | 1 | 0.99 | 1 | 0.92 | 0.97 | 1 | 1 | 1 | 0.99 | 0.96 | 0.9 |
| 3382: 326 | 1517 | 0.97 | 0.95 | 0.95 | 1 | 0.91 | 0.95 | 0.96 | 0.92 | 0.97 | 0.96 | 0.94 | 0.95 |
| 3382: 332 | 1523 | 0.96 | 1 | 1 | 0.95 | 0.97 | 1 | 1 | 0.87 | 1 | 1 | 0.98 | 1 |
| 3382: 347 | 1538 | 0.9 | 1 | 0.85 | 0.79 | 0.86 | 1 | 0.89 | 0.87 | 0.78 | 1 | 0.74 | 0.79 |

| | MVP | | | | | | | | | | | | | | |
|---|---|---|---|---|---|---|---|---|---|---|---|---|---|---|---|
| CpG | Position | | | | | | | | | | | | | | |
| identifier | in ROI | Lung | Lung | Lung | Lung | Lung | Liver | Liver | Breast | Breast | Breast | Breast | Breast | Brain | Brain |
| 3382: 33 | 1224 | 0.58 | 0.8 | 0.77 | 0.65 | 0.73 | 0.37 | 0.13 | 0.42 | 0.23 | 0.38 | 0.34 | 0.46 | 0.4 | 0.44 |
| 3382: 42 | 1233 | 0.67 | 0.93 | 0.91 | 0.78 | 0.74 | 0.73 | 0.48 | 0.84 | 0.53 | 0.77 | 0.39 | 0.72 | 1 | 0.72 |
| 3382: 63 | 1254 | 0.56 | 0.83 | 0.69 | 0.77 | 0.76 | 0.55 | 0.14 | 0.53 | 0.53 | 0.62 | 0.25 | 0.57 | 0.53 | 0.72 |
| 3382: 231 | 1422 | 0.53 | 0.63 | 0.6 | 0.66 | 0.72 | 0.87 | 0.71 | 0.28 | 0.26 | 0.46 | 0.42 | 0.39 | 0.52 | 0.42 |
| 3382: 248 | 1439 | 0.62 | 0.82 | 0.72 | 0.73 | 0.76 | 0.9 | 0.67 | 0.45 | 0.37 | 0.19 | 0.65 | 0.68 | 0.26 | 0.42 |
| 3382: 257 | 1448 | 0.83 | 0.88 | 0.72 | 1 | 0.98 | 0.91 | 0.86 | 0.8 | 0.91 | 0.62 | 0.88 | 0.52 | 0.63 | 0.82 |
| 3382: 263 | 1454 | 0.68 | 0.94 | 0.54 | 0.67 | 0.82 | 0.84 | 0.7 | 0.43 | 0.42 | 0.36 | 0.4 | 0.45 | 0.37 | 0.66 |
| 3382: 284 | 1475 | 0.93 | 0.92 | 0.96 | 0.97 | 1 | 0.97 | 1 | 0.72 | 0.73 | 0.64 | 0.98 | 0.84 | 0.81 | 0.78 |
| 3382: 302 | 1493 | 0.91 | 1 | 0.99 | 0.99 | 1 | 1 | 0.96 | 0.73 | 1 | 0.8 | 0.96 | 0.78 | 0.88 | 0.84 |
| 3382: 308 | 1499 | 0.83 | 1 | 0.91 | 0.87 | 0.96 | 0.8 | 0.79 | 0.54 | 0.52 | 0.53 | 0.57 | 0.55 | 0.43 | 0.65 |
| 3382: 314 | 1505 | 0.98 | 1 | 1 | 1 | 1 | 0.94 | 0.97 | 0.78 | 0.9 | 0.7 | 0.98 | 0.86 | 0.85 | 0.86 |
| 3382: 326 | 1517 | 0.99 | 0.93 | 0.94 | 1 | 1 | 0.97 | 0.95 | 0.83 | 0.62 | 0.59 | 0.73 | 0.69 | 0.71 | 0.84 |
| 3382: 332 | 1523 | 0.94 | 1 | 1 | 0.98 | 1 | 0.91 | 0.89 | 0.94 | 0.75 | 0.6 | 1 | 1 | 0.66 | 0.89 |
| 3382: 347 | 1538 | 0.88 | 1 | 0.85 | 0.98 | 0.86 | 0.93 | 0.98 | 0.58 | 0.71 | 0.56 | 0.62 | 0.64 | 0.6 | 0.78 |

| | MVP | | | | | |
|---|---|---|---|---|---|---|
| CpG | Position in | | | | | |
| identifier | ROI | Brain | Brain | Brain | Brain | Brain |
| 3382: 33 | 1224 | 0.67 | 1 | 0.75 | 0.43 | 0.35 |
| 3382: 42 | 1233 | 0.94 | 0.14 | 0.95 | 0.93 | 0.64 |
| 3382: 63 | 1254 | 0.79 | 0.75 | 0.91 | 0.79 | 0.69 |
| 3382: 231 | 1422 | 0.33 | 0.29 | 0.51 | 0.42 | 0.23 |
| 3382: 248 | 1439 | 0.5 | 0.12 | 0.32 | 0.51 | 0.44 |
| 3382: 257 | 1448 | 0.81 | 0.19 | 0.9 | 0.92 | 0.81 |
| 3382: 263 | 1454 | 0.65 | 0.62 | 0.61 | 0.6 | 0.48 |
| 3382: 284 | 1475 | 0.87 | 0.76 | 1 | 0.77 | 0.77 |
| 3382: 302 | 1493 | 1 | 0.74 | 0.97 | 0.94 | 0.79 |
| 3382: 308 | 1499 | 0.78 | 0.57 | 0.77 | 0.76 | 0.63 |
| 3382: 314 | 1505 | 1 | 0.64 | 0.98 | 0.9 | 0.87 |
| 3382: 326 | 1517 | 0.93 | 0.75 | 1 | 0.82 | 0.69 |
| 3382: 332 | 1523 | 0.97 | 0.55 | 1 | 0.77 | 0.79 |
| 3382: 347 | 1538 | 0.82 | 0.97 | 0.99 | 0.81 | 0.78 |

[0327] TABLE 37
(3083)

| Position of | Position of | | from | | outstanding |
|---|---|---|---|---|---|
| MVP within | MVP within | | other | | marker |
| amplificate | ROI | identifies | types | P value | position |
| 3083: 28 | 442 | liver | all | 0.0152 | ✓ |
| 3083: 31 | 445 | liver | all | 0.0476 | ✓ |
| 3083: 40 | 454 | liver | all | 0.00102 | ✓ |
| 3083: 55 | 469 | liver | all | 0.0167 | ✓ |
| 3083: 61 | 475 | liver | all | 0.0038 | ✓ |
| 3083: 95 | 509 | liver | all | 0.0287 | ✓ |
| 3083: 122 | 536 | liver | all | 0.00984 | ✓ |
| 3083: 143 | 557 | liver | all | 0.0293 | ✓ |
| 3083: 161 | 575 | liver | all | 0.0208 | ✓ |
| 3083: 202 | 616 | liver | all | 7.46E−08 | ✓ |
| 3083: 216 | 630 | liver | all | 0.0145 | ✓ |
| 3083: 235 | 649 | liver | all | 0.0206 | ✓ |
| 3083: 250 | 664 | liver | all | 0.00667 | ✓ |
| 3083: 262 | 676 | liver | all | 0.0215 | ✓ |
| 3083: 265 | 679 | liver | all | 0.0336 | ✓ |
| 3083: 269 | 683 | liver | all | 0.0219 | ✓ |
| 3083: 294 | 708 | liver | all | 0.0046 | ✓ |
| 3083: 299 | 713 | liver | all | 0.0241 | ✓ |

[0328] TABLE 38
(3084)

| Position of | Position of | | from | | outstanding |
|---|---|---|---|---|---|
| MVP within | MVP within | | other | | marker |
| amplificate | ROI | identifies | types | P value | position |
| 3084: 41 | 1017 | breast | all | 0.626 | — |
| 3084: 56 | 1032 | breast | all | 0.00904 | ✓ |
| 3084: 69 | 1045 | breast | all | 0.00536 | ✓ |
| 3084: 72 | 1048 | breast | all | 0.0607 | — |
| 3084: 77 | 1053 | breast | all | 0.198 | — |
| 3084: 101 | 1077 | breast | all | 0.0027 | ✓ |
| 3084: 201 | 1177 | breast | all | 0.0877 | — |
| 3084: 276 | 1252 | brain | all | 0.00034 | ✓ |
| 3084: 301 | 1277 | brain | all | 0.000478 | ✓ |
| 3084: 349 | 1325 | brain | all | 5.31E−06 | ✓ |
| 3084: 364 | 1340 | brain | all | 1.06E−05 | ✓ |

[0329] TABLE 39
(3091)

| Position of | Position of | | from | | outstanding |
|---|---|---|---|---|---|
| MVP within | MVP within | | other | | marker |
| amplificate | ROI | identifies | types | P value | position |
| 3091: 99 | 1766 | breast | all | 0.159 | — |
| 3091: 159 | 1826 | breast | all | 0.105 | — |
| 3091: 198 | 1865 | breast | all | 0.622 | — |
| 3091: 205 | 1872 | breast | all | 0.11 | — |
| 3091: 217 | 1884 | breast | all | 0.357 | — |
| 3091: 241 | 1908 | breast | all | 0.135 | — |
| 3091: 247 | 1914 | breast | all | 0.293 | — |
| 3091: 257 | 1924 | breast | all | 0.0351 | ✓ |
| 3091: 272 | 1939 | breast | all | 0.162 | — |
| 3091: 281 | 1948 | breast | all | 0.0678 | — |
| 3091: 286 | 1953 | breast | all | 0.592 | — |
| 3091: 303 | 1970 | breast | all | 0.00249 | ✓ |
| 3091: 320 | 1987 | breast | all | 0.00104 | ✓ |
| 3091: 334 | 2001 | breast | all | 0.548 | — |
| 3091: 337 | 2004 | breast | all | 0.00752 | ✓ |
| 3091: 370 | 2037 | breast | all | 0.152 | — |
| 3091: 379 | 2046 | breast | all | 0.0188 | ✓ |
| 3091: 391 | 2058 | breast | all | 0.0503 | — |
| 3091: 449 | 2116 | breast | all | 0.929 | — |

[0330] TABLE 40
(3093)

| Position of | Position of | | from | | outstanding |
|---|---|---|---|---|---|
| MVP within | MVP within | | other | | marker |
| amplificate | ROI | identifies | types | P value | position |
| 3093: 24 | 1122 | liver | all | 0.112 | — |
| 3093: 31 | 1129 | liver | all | 0.568 | — |
| 3093: 39 | 1137 | liver | all | 0.741 | — |
| 3093: 99 | 1197 | liver | all | 0.375 | — |
| 3093: 104 | 1202 | liver | all | 0.5 | — |
| 3093: 182 | 1280 | liver | all | 0.0428 | ✓ |
| 3093: 193 | 1291 | liver | all | 0.0354 | ✓ |
| 3093: 217 | 1315 | liver | all | NA | — |
| 3093: 232 | 1330 | liver | all | 0.163 | — |
| 3093: 240 | 1338 | liver | all | 0.139 | — |
| 3093: 247 | 1345 | liver | all | 0.0456 | ✓ |
| 3093: 256 | 1354 | liver | all | 0.491 | — |
| 3093: 258 | 1356 | liver | all | 0.0239 | ✓ |
| 3093: 269 | 1367 | liver | all | 0.893 | — |
| 3093: 277 | 1375 | liver | all | 0.0473 | ✓ |
| 3093: 319 | 1417 | liver | all | 0.0237 | ✓ |
| 3093: 347 | 1445 | liver | all | 0.0562 | — |
| 3093: 358 | 1456 | liver | all | 0.0819 | — |
| 3093: 395 | 1493 | liver | all | 0.507 | — |
| 3093: 398 | 1496 | liver | all | 0.528 | — |
| 3093: 415 | 1513 | liver | all | 0.623 | — |
| 3093: 433 | 1531 | liver | all | 0.871 | — |
| 3093: 440 | 1538 | liver | all | 0.534 | — |

[0331] TABLE 41
(3094)

| Position of | Position of | | from | | outstanding |
|---|---|---|---|---|---|
| MVP within | MVP within | | other | | marker |
| amplificate | ROI | identifies | types | P value | position |
| 3094: 79 | 549 | liver | all | 0.0144 | √ |
| 3094: 103 | 573 | liver | all | 0.124 | — |
| 3094: 118 | 588 | liver | all | 0.845 | — |
| 3094: 148 | 618 | liver | all | 0.0177 | √ |
| 3094: 151 | 621 | liver | all | 0.000113 | √ |
| 3094: 155 | 625 | liver | all | NA | — |
| 3094: 162 | 632 | liver | all | 0.0216 | √ |
| 3094: 169 | 639 | liver | all | 0.00245 | √ |
| 3094: 195 | 665 | liver | all | 0.0673 | — |
| 3094: 342 | 812 | liver | all | 0.555 | — |
| 3094: 393 | 863 | liver | all | 0.653 | — |

[0332] TABLE 42
(3103)

| Position of | Position of | | from | | outstanding |
|---|---|---|---|---|---|
| MVP within | MVP within | | other | | marker |
| amplificate | ROI | identifies | types | P value | position |
| 3103: 41 | 1752 | liver | all | NA | — |
| 3103: 47 | 1758 | liver | all | 0.643 | — |
| 3103: 76 | 1787 | liver | all | 0.324 | — |
| 3103: 89 | 1800 | liver | all | 0.564 | — |
| 3103: 106 | 1817 | liver | all | 0.263 | — |
| 3103: 152 | 1863 | liver | all | 0.186 | — |
| 3103: 163 | 1874 | liver | all | 0.0597 | — |
| 3103: 190 | 1901 | liver | all | 0.109 | — |
| 3103: 196 | 1907 | liver | all | 0.152 | — |
| 3103: 203 | 1914 | liver | all | 0.0986 | — |
| 3103: 227 | 1938 | liver | all | 0.0574 | — |
| 3103: 231 | 1942 | liver | all | 0.068 | — |
| 3103: 238 | 1949 | liver | all | 0.141 | — |
| 3103: 279 | 1990 | liver | all | 0.0399 | √ |
| 3103: 285 | 1996 | liver | all | NA | — |
| 3103: 292 | 2003 | liver | all | 0.0746 | — |
| 3103: 294 | 2005 | liver | all | 0.0671 | — |
| 3103: 306 | 2017 | liver | all | NA | — |
| 3103: 311 | 2022 | liver | all | 0.104 | — |
| 3103: 317 | 2028 | liver | all | 0.246 | — |
| 3103: 319 | 2030 | liver | all | 0.109 | — |
| 3103: 333 | 2044 | liver | all | 0.048 | √ |
| 3103: 346 | 2057 | liver | all | NA | — |
| 3103: 365 | 2076 | liver | all | NA | — |
| 3103: 378 | 2089 | liver | all | 0.0884 | — |
| 3103: 384 | 2095 | liver | all | NA | — |

[0333] TABLE 43
(3104)

| Position of | Position of | | from | | outstanding |
|---|---|---|---|---|---|
| MVP within | MVP within | | other | | marker |
| amplificate | ROI | identifies | types | P value | position |
| 3104: 75 | 1818 | liver | all | 0.0358 | √ |
| 3104: 79 | 1822 | liver | all | 0.0199 | √ |
| 3104: 132 | 1875 | liver | all | 0.163 | — |
| 3104: 137 | 1880 | liver | all | 0.0506 | — |
| 3104: 245 | 1988 | liver | all | 0.0402 | √ |
| 3104: 249 | 1992 | liver | all | 0.00809 | √ |
| 3104: 254 | 1997 | liver | all | 0.209 | — |
| 3104: 302 | 2045 | liver | all | 0.316 | — |
| 3104: 306 | 2049 | liver | all | 0.826 | — |
| 3104: 333 | 2076 | liver | all | 0.0609 | — |
| 3104: 349 | 2092 | liver | all | 0.308 | — |
| 3104: 361 | 2104 | liver | all | 0.474 | — |
| 3104: 386 | 2129 | liver | all | 0.411 | — |
| 3104: 425 | 2168 | liver | all | 0.957 | — |
| 3104: 475 | 2218 | liver | all | NA | — |

[0334] TABLE 44
(3105)

| Position of | Position of | | from | | outstanding |
|---|---|---|---|---|---|
| MVP within | MVP within | | other | | marker |
| amplificate | ROI | identifies | types | P value | position |
| 3105: 45 | 300 | breast | all | 4.86e−05 | √ |
| 3105: 64 | 319 | breast | all | 0.026 | √ |
| 3105: 73 | 328 | breast | all | 3.78E−05 | √ |
| 3105: 85 | 340 | breast | all | 6.74E−05 | √ |
| 3105: 97 | 352 | breast | all | 0.152 | — |
| 3105: 132 | 387 | breast | all | 0.000617 | √ |
| 3105: 136 | 391 | breast | all | 0.00215 | √ |
| 3105: 151 | 406 | breast | all | 0.000385 | √ |
| 3105: 163 | 418 | breast | all | 0.000556 | √ |
| 3105: 172 | 427 | breast | all | 0.00529 | √ |
| 3105: 193 | 448 | breast | all | 0.000129 | √ |
| 3105: 202 | 457 | breast | all | 0.00136 | √ |
| 3105: 256 | 511 | breast | all | 0.00171 | √ |
| 3105: 280 | 535 | breast | all | 0.00685 | √ |
| 3105: 301 | 556 | breast | all | 0.21 | — |
| 3105: 337 | 592 | breast | all | 0.0455 | √ |
| 3105: 364 | 619 | breast | all | 0.00288 | √ |
| 3105: 367 | 622 | breast | all | 0.174 | — |
| 3105: 375 | 630 | breast | all | 0.0666 | — |
| and | | | | | |
| 3105: 45 | 300 | muscle | pros- | 0.243 | — |
| | | | tate, | | |
| | | | liver, | | |
| | | | brain, | | |
| | | | lung | | |
| 3105: 64 | 319 | muscle | all | 0.00724 | √ |
| 3105: 73 | 328 | muscle | all | 0.961 | — |
| 3105: 85 | 340 | muscle | all | 0.493 | — |
| 3105: 97 | 352 | muscle | all | 0.159 | — |
| 3105: 132 | 387 | muscle | all | 0.206 | — |
| 3105: 136 | 391 | muscle | all | 0.0999 | — |
| 3105: 151 | 406 | muscle | all | 0.516 | — |
| 3105: 163 | 418 | muscle | all | 0.0952 | — |
| 3105: 172 | 427 | muscle | all | 0.689 | — |
| 3105: 193 | 448 | muscle | all | 0.285 | — |
| 3105: 202 | 457 | muscle | all | 0.752 | — |
| 3105: 256 | 511 | muscle | all | 0.0069 | √ |
| 3105: 280 | 535 | muscle | all | 0.00173 | √ |
| 3105: 301 | 556 | muscle | all | 0.00199 | √ |
| 3105: 337 | 592 | muscle | all | 0.000502 | √ |
| 3105: 364 | 619 | muscle | all | 0.331 | — |
| 3105: 367 | 622 | muscle | all | 0.0113 | √ |
| 3105: 375 | 630 | muscle | all | 0.00565 | √ |

[0335] TABLE 45
(3107)

| Position of | | | | | outstanding |
|---|---|---|---|---|---|
| MVP within | Position of | | from other | | marker |
| amplificate | MVP within ROI | identifies | types | P value | position |
| 3107: 58 | 336 | brain | breast, lung | 0.161 | — |
| 3107: 60 | 338 | brain | breast, lung | 0.572 | — |
| 3107: 80 | 358 | brain | breast, lung | 0.352 | — |
| 3107: 97 | 375 | brain | breast, lung | 0.352 | — |
| 3107: 100 | 378 | brain | breast, lung | 0.527 | — |
| 3107: 120 | 398 | brain | breast, lung | 0.028 | √ |
| 3107: 137 | 415 | brain | breast, lung | 0.667 | — |
| 3107: 139 | 417 | brain | breast, lung | 0.668 | — |
| 3107: 148 | 426 | brain | breast, lung | 0.853 | — |
| 3107: 164 | 442 | brain | breast, lung | 0.354 | — |
| 3107: 187 | 465 | brain | breast, lung | 0.371 | — |
| 3107: 190 | 468 | brain | breast, lung | 0.513 | — |
| 3107: 209 | 487 | brain | breast, lung | 0.0142 | √ |
| 3107: 224 | 502 | brain | breast, lung | 0.0193 | √ |
| 3107: 233 | 511 | brain | breast, lung | 0.00466 | √ |
| 3107: 243 | 521 | brain | breast, lung | 0.0127 | √ |
| 3107: 257 | 535 | brain | breast, lung | 0.0127 | √ |
| 3107: 265 | 543 | brain | breast, lung | 0.00799 | √ |
| 3107: 400 | 678 | brain | breast, lung | 0.0773 | — |
| and | | | | | |
| 3107: 58 | 336 | breast, lung | all | 0.124 | — |
| 3107: 60 | 338 | breast, lung | all | 0.807 | — |
| 3107: 80 | 358 | breast, lung | all | 0.333 | — |
| 3107: 97 | 375 | breast, lung | all | 0.685 | — |
| 3107: 100 | 378 | breast, lung | all | 0.211 | — |
| 3107: 120 | 398 | breast, lung | all | 0.0493 | √ |
| 3107: 137 | 415 | breast, lung | all | 0.273 | — |
| 3107: 139 | 417 | breast, lung | all | 0.125 | — |
| 3107: 148 | 426 | breast, lung | all | 0.161 | — |
| 3107: 164 | 442 | breast, lung | all | 0.0666 | — |
| 3107: 187 | 465 | breast, lung | all | 0.266 | — |
| 3107: 190 | 468 | breast, lung | all | 0.266 | — |
| 3107: 209 | 487 | breast, lung | all | 0.0139 | √ |
| 3107: 224 | 502 | breast, lung | all | 0.00911 | √ |
| 3107: 233 | 511 | breast, lung | all | 0.0185 | √ |
| 3107: 243 | 521 | breast, lung | all | 0.000884 | √ |
| 3107: 257 | 535 | breast, lung | all | 0.0045 | √ |
| 3107: 265 | 543 | breast, lung | all | 0.000936 | √ |
| 3107: 400 | 678 | breast, lung | all | 0.0902 | — |

[0336] TABLE 46
(3110)

| Position of | | | | | outstanding |
|---|---|---|---|---|---|
| MVP within | Position of | | from other | | marker |
| amplificate | MVP within ROI | identifies | types | P value | position |
| 3110: 32 | 442 | breast, brain, | liver, lung, | 0.2150 | — |
| | | muscle | prostate | | |
| 3110: 84 | 445 | breast, brain, | liver, lung, | 0.00146 | √ |
| | | muscle | prostate | | |
| 3110: 286 | 454 | breast, brain, | liver, lung, | 0.000644 | √ |
| | | muscle | prostate | | |
| 3110: 310 | 469 | breast, brain, | liver, lung, | 0.000156 | √ |
| | | muscle | prostate | | |
| 3110: 366 | 475 | breast, brain, | liver, lung, | 0.0045 | √ |
| | | muscle | prostate | | |
| 3110: 370 | 509 | breast, brain, | liver, lung, | 0.0246 | √ |
| | | muscle | prostate | | |
| 3110: 415 | 536 | breast, brain, | liver, lung, | 0.108 | — |
| | | muscle | prostate | | |

[0337] TABLE 47
(3113)

| Position of | | | | | outstanding |
|---|---|---|---|---|---|
| MVP within | Position of | | from other | | marker |
| amplificate | MVP within ROI | identifies | types | P value | position |
| 3113: 42 | 61 | breast, liver, | brain, lung | 0.0432 | √ |
| | | muscle | | | |
| 3113: 47 | 66 | breast, liver, | brain, lung | 0.321 | — |
| | | muscle | | | |
| 3113: 72 | 91 | breast, liver, | brain, lung | 0.013 | √ |
| | | muscle | | | |
| 3113: 78 | 97 | breast, liver, | brain, lung | 0.0000741 | √ |
| | | muscle | | | |
| 3113: 86 | 105 | breast, liver, | brain, lung | 0.0000488 | √ |
| | | muscle | | | |
| 3113: 116 | 135 | breast, liver, | brain, lung | 0.0000893 | √ |
| | | muscle | | | |
| 3113: 156 | 175 | breast, liver, | brain, lung | 0.000525 | √ |
| | | muscle | | | |
| 3113: 160 | 179 | breast, liver, | brain, lung | 0.000508 | √ |
| | | muscle | | | |
| 3113: 164 | 183 | breast, liver, | brain, lung | 0.000217 | √ |
| | | muscle | | | |
| 3113: 182 | 201 | breast, liver, | brain, lung | 0.000637 | √ |
| | | muscle | | | |
| 3113: 189 | 208 | breast, liver, | brain, lung | 0.000212 | √ |
| | | muscle | | | |
| 3113: 197 | 216 | breast, liver, | brain, lung | 0.0027 | √ |
| | | muscle | | | |
| 3113: 298 | 317 | breast, liver, | brain, lung | 0.8 | — |
| | | muscle | | | |
| 3113: 303 | 322 | breast, liver, | brain, lung | 0.00676 | √ |
| | | muscle | | | |
| 3113: 378 | 397 | breast, liver, | brain, lung | 0.00615 | √ |
| | | muscle | | | |
| 3113: 400 | 419 | breast, liver, | brain, lung | 0.0046 | √ |
| | | muscle | | | |
| 3113: 406 | 425 | breast, liver, | brain, lung | 0.0585 | — |
| | | muscle | | | |

[0338] TABLE 48
(3127)

| Position of | Position of | | from | | outstanding |
|---|---|---|---|---|---|
| MVP within | MVP within | | other | | marker |
| amplificate | ROI | identifies | types | P value | position |
| 3127: 25 | 1756 | breast | all | 0.00132 | √ |
| 3127: 28 | 1759 | breast | all | 0.0106 | √ |
| 3127: 63 | 1794 | breast | all | 0.00176 | √ |
| 3127: 73 | 1804 | breast | all | 0.00104 | √ |
| 3127: 124 | 1855 | breast | all | 0.0011 | √ |
| 3127: 127 | 1858 | breast | all | 0.0022 | √ |
| 3127: 175 | 1906 | breast | all | 0.0279 | √ |

[0339] TABLE 49
(3129)

| Position of | Position of | | from | | outstanding |
|---|---|---|---|---|---|
| MVP within | MVP within | | other | | marker |
| amplificate | ROI | identifies | types | P value | position |
| 3129: 99 | 1999 | liver | all | 0.887 | — |
| 3129: 111 | 2011 | liver | all | 0.76 | — |
| 3129: 125 | 2025 | liver | all | 0.672 | — |
| 3129: 137 | 2037 | liver | all | 0.435 | — |
| 3129: 139 | 2039 | liver | all | 0.275 | — |
| 3129: 144 | 2044 | liver | all | 0.31 | — |
| 3129: 148 | 2048 | liver | all | 0.888 | — |
| 3129: 157 | 2057 | liver | all | 0.212 | — |
| 3129: 162 | 2062 | liver | all | 0.698 | — |
| 3129: 178 | 2078 | liver | all | 0.0875 | — |
| 3129: 184 | 2084 | liver | all | 0.0933 | — |
| 3129: 216 | 2116 | liver | all | 0.606 | — |
| 3129: 261 | 2161 | liver | all | 0.0444 | √ |
| 3129: 341 | 2241 | liver | all | 0.0134 | √ |
| 3129: 353 | 2253 | liver | all | 0.105 | — |
| 3129: 357 | 2257 | liver | all | 0.000186 | √ |
| 3129: 368 | 2268 | liver | all | 0.0288 | √ |
| 3129: 371 | 2271 | liver | all | 0.0346 | √ |
| 3129: 377 | 2277 | liver | all | 0.00985 | √ |
| 3129: 384 | 2284 | liver | all | 0.0281 | √ |
| 3129: 402 | 2302 | liver | all | 0.019 | √ |
| 3129: 438 | 2338 | liver | all | 0.286 | — |
| 3129: 453 | 2353 | liver | all | 0.242 | — |
| 3129: 475 | 2375 | liver | all | 0.539 | — |

[0340] TABLE 50
(3145)

| | Position | | | | out- |
|---|---|---|---|---|---|
| | of | | | | stand- |
| Position of | MVP | | from | | ing |
| MVP within | within | | other | | marker |
| amplificate | ROI | identifies | types | P value | position |
| 3145: 46 | 664 | liver, muscle | breast, brain | 0.0589 | — |
| 3145: 94 | 712 | liver, muscle | breast, brain | 0.0143 | √ |
| 3145: 102 | 720 | liver, muscle | breast, brain | 0.000709 | √ |
| 3145: 110 | 728 | liver, muscle | breast, brain | 0.000756 | √ |
| 3145: 140 | 758 | liver, muscle | breast, brain | 0.0143 | √ |
| 3145: 158 | 776 | liver, muscle | breast, brain | 0.00656 | √ |
| 3145: 268 | 886 | liver, muscle | breast, brain | 0.0233 | √ |
| 3145: 354 | 972 | liver, muscle | breast, brain | 0.00123 | √ |
| 3145: 388 | 1006 | liver, muscle | breast, brain | 0.00139 | √ |
| 3145: 445 | 1063 | liver, muscle | breast, brain | 0.385 | — |

[0341] TABLE 51
(ROI 3152)

| Position of | Position of | | | | outstanding |
|---|---|---|---|---|---|
| MVP within | MVP within | | | | marker |
| amplificate | ROI | identifies | from other types | P value | position |
| 3152: 26 | 1818 | brain, breast, | lung, prostate | 0.808 | — |
| | | muscle | | | |
| 3152: 56 | 1851 | brain, breast, | lung, prostate | 0.0464 | √ |
| | | muscle | | | |
| 3152: 138 | 1933 | brain, breast, | lung, prostate | 0.0516 | — |
| | | muscle | | | |
| 3152: 234 | 2029 | brain, breast, | lung, prostate | 0.000278 | √ |
| | | muscle | | | |
| 3152: 283 | 2078 | brain, breast, | lung, prostate | 0.000919 | √ |
| | | muscle | | | |
| 3152: 361 | 2156 | brain, breast, | lung, prostate | 0.00859 | √ |
| | | muscle | | | |

[0342] TABLE 52
(3170)

| Position of | Position of | | from | | outstanding |
|---|---|---|---|---|---|
| MVP within | MVP within | | other | | marker |
| amplificate | ROI | identifies | types | P value | position |
| 3170: 170 | 1858 | lung | all | 0.673 | — |
| 3170: 175 | 1863 | lung | all | 0.755 | — |
| 3170: 353 | 2041 | lung | all | 0.0714 | — |
| 3170: 385 | 2073 | lung | all | 0.0118 | √ |
| 3170: 396 | 2084 | lung | all | 0.00962 | √ |
| 3170: 409 | 2097 | lung | all | 0.0159 | √ |
| 3170: 412 | 2100 | lung | all | 0.0308 | √ |

[0343] TABLE 53
(3192)

| Position of | Position of | | | | |
|---|---|---|---|---|---|
| MVP within | MVP within | | | | outstanding |
| amplificate | ROI | identifies | from other types | P value | marker position |
| 3192: 29 | 375 | lung | breast, prostate, | 0.0256 | √ |
| | | | muscle, liver | | |
| 3192: 108 | 454 | lung | breast, prostate, | 0.000715 | √ |
| | | | muscle, liver | | |
| 3192: 128 | 474 | lung | breast, prostate, | 0.00125 | √ |
| | | | muscle, liver | | |
| 3192: 160 | 506 | lung | breast, prostate, | 0.000213 | √ |
| | | | muscle, liver | | |
| 3192: 166 | 512 | lung | breast, prostate, | 0.000715 | √ |
| | | | muscle, liver | | |
| 3192: 172 | 518 | lung | breast, prostate, | 0.000899 | √ |
| | | | muscle, liver | | |
| 3192: 191 | 537 | lung | breast, prostate, | 0.000213 | √ |
| | | | muscle, liver | | |
| 3192: 265 | 611 | lung | breast, prostate, | 0.00221 | √ |
| | | | muscle, liver | | |
| 3192: 268 | 614 | lung | breast, prostate, | 0.00985 | √ |
| | | | muscle, liver | | |
| 3192: 362 | 708 | lung | breast, prostate, | 0.000213 | √ |
| | | | muscle, liver | | |
| 3192: 368 | 714 | lung | breast, prostate, | 0.000882 | √ |
| | | | muscle, liver | | |
| 3192: 427 | 773 | lung | breast, prostate, | 0.178 | — |
| | | | muscle, liver | | |

[0344] TABLE 54
(3200)

| Position of | Position of | | from | | outstanding |
|---|---|---|---|---|---|
| MVP within | MVP within | | other | | marker |
| amplificate | ROI | identifies | types | P value | position |
| 3200: 36 | 1897 | liver | all | 0.0534 | — |
| 3200: 49 | 1910 | liver | all | 0.193 | — |
| 3200: 66 | 1927 | liver | all | 0.0276 | √ |
| 3200: 78 | 1939 | liver | all | 0.0043 | √ |
| 3200: 83 | 1944 | liver | all | 0.0086 | √ |
| 3200: 99 | 1960 | liver | all | 0.46 | — |
| 3200: 127 | 1988 | liver | all | 0.0086 | √ |
| 3200: 155 | 2016 | liver | all | 0.294 | — |
| 3200: 160 | 2021 | liver | all | 0.0086 | √ |
| 3200: 169 | 2030 | liver | all | 0.0086 | √ |
| 3200: 178 | 2039 | liver | all | 0.0043 | √ |
| 3200: 192 | 2053 | liver | all | 0.184 | — |
| 3200: 199 | 2060 | liver | all | 0.0086 | √ |
| 3200: 225 | 2086 | liver | all | 0.0086 | √ |
| 3200: 305 | 2166 | liver | all | 0.0219 | √ |
| 3200: 312 | 2173 | liver | all | 0.0043 | √ |
| 3200: 361 | 2222 | liver | all | 0.0644 | — |

[0345] TABLE 55
(3208)

| Position of | Position of | | from | | outstanding |
|---|---|---|---|---|---|
| MVP within | MVP within | | other | | marker |
| amplificate | ROI | identifies | types | P value | position |
| 3208: 33 | 729 | liver | all | 0.0376 | √ |
| 3208: 45 | 741 | liver | all | 0.0219 | √ |
| 3208: 69 | 765 | liver | all | 0.048 | √ |
| 3208: 111 | 807 | liver | all | 0.093 | — |
| 3208: 119 | 815 | liver | all | 0.0219 | √ |
| 3208: 127 | 823 | liver | all | 0.00403 | √ |
| 3208: 148 | 844 | liver | all | 0.039 | √ |
| 3208: 164 | 860 | liver | all | 0.0293 | √ |
| 3208: 303 | 999 | liver | all | 0.0321 | √ |
| 3208: 338 | 1034 | liver | all | 0.355 | — |
| 3208: 349 | 1045 | liver | all | 0.11 | — |
| 3208: 371 | 1067 | liver | all | 0.358 | — |
| 3208: 392 | 1088 | liver | all | 0.404 | — |
| 3208: 403 | 1099 | liver | all | 0.695 | — |
| 3208: 436 | 1132 | liver | all | 0.358 | — |
| 3208: 455 | 1151 | liver | all | NA | — |
| 3208: 461 | 1157 | liver | all | NA | — |

[0346] TABLE 56
(3239)

| Position of | Position of | | | | outstanding |
|---|---|---|---|---|---|
| MVP within | MVP within | | from other | | marker |
| amplificate | ROI | identifies | types | P value | position |
| 3239: 38 | 623 | breast, prostate | brain, lung, | 0.00402 | √ |
| | | | liver | | |
| 3239: 44 | 629 | breast, prostate | brain, lung, | 0.0622 | — |
| | | | liver | | |
| 3239: 49 | 634 | breast, prostate | brain, lung, | 0.00448 | √ |
| | | | liver | | |
| 3239: 71 | 656 | breast, prostate | brain, lung, | 0.000516 | √ |
| | | | liver | | |
| 3239: 75 | 660 | breast, prostate | brain, lung, | 0.41 | — |
| | | | liver | | |
| 3239: 88 | 673 | breast, prostate | brain, lung, | 0.354 | — |
| | | | liver | | |
| 3239: 141 | 726 | breast, prostate | brain, lung, | 0.212 | — |
| | | | liver | | |
| 3239: 163 | 748 | breast, prostate | brain, lung, | 0.00371 | √ |
| | | | liver | | |
| 3239: 169 | 754 | breast, prostate | brain, lung, | 0.00107 | √ |
| | | | liver | | |
| 3239: 178 | 763 | breast, prostate | brain, lung, | 0.00141 | √ |
| | | | liver | | |
| 3239: 197 | 782 | breast, prostate | brain, lung, | 0.000187 | √ |
| | | | liver | | |
| 3239: 212 | 797 | breast, prostate | brain, lung, | 0.00002020 | √ |
| | | | liver | | |
| 3239: 218 | 803 | breast, prostate | brain, lung, | 0.0152 | √ |
| | | | liver | | |
| 3239: 233 | 818 | breast, prostate | brain, lung, | 0.000225 | √ |
| | | | liver | | |
| 3239: 236 | 821 | breast, prostate | brain, lung, | 0.000271 | √ |
| | | | liver | | |
| 3239: 242 | 827 | breast, prostate | brain, lung, | 8.75E−05 | √ |
| | | | liver | | |
| 3239: 250 | 835 | breast, prostate | brain, lung, | 0.00547 | √ |
| | | | liver | | |
| 3239: 256 | 841 | breast, prostate | brain, lung, | 0.00632 | √ |
| | | | liver | | |
| 3239: 262 | 847 | breast, prostate | brain, lung, | 0.00615 | √ |
| | | | liver | | |
| 3239: 285 | 870 | breast, prostate | brain, lung, | 0.0299 | √ |
| | | | liver | | |
| 3239: 300 | 885 | breast, prostate | brain, lung, | 0.934 | — |
| | | | liver | | |
| 3239: 319 | 904 | breast, prostate | brain, lung, | 0.0123 | √ |
| | | | liver | | |
| 3239: 328 | 913 | breast, prostate | brain, lung, | 0.00291 | √ |
| | | | liver | | |
| 3239: 337 | 922 | breast, prostate | brain, lung, | 0.484 | — |
| | | | liver | | |
| 3239: 340 | 925 | breast, prostate | brain, lung, | 0.056 | — |
| | | | liver | | |
| 3239: 343 | 928 | breast, prostate | brain, lung, | 0.275 | — |
| | | | liver | | |
| 3239: 348 | 933 | breast, prostate | brain, lung, | 0.68 | — |
| | | | liver | | |
| 3239: 354 | 939 | breast, prostate | brain, lung, | 0.00231 | √ |
| | | | liver | | |
| 3239: 360 | 945 | breast, prostate | brain, lung, | 0.261 | — |
| | | | liver | | |
| 3239: 366 | 951 | breast, prostate | brain, lung, | 0.479 | — |
| | | | liver | | |
| 3239: 377 | 962 | breast, prostate | brain, lung, | 0.369 | — |
| | | | liver | | |
| 3239: 421 | 1006 | breast, prostate | brain, lung, | 0.332 | — |
| | | | liver | | |

[0347] TABLE 57
(3243)

| Position of | Position of | | from | | outstanding |
|---|---|---|---|---|---|
| MVP within | MVP within | | other | | marker |
| amplificate | ROI | identifies | types | P value | position |
| 3243: 57 | 1576 | Breast | all | 0.196 | — |
| 3243: 63 | 1582 | Breast | all | NA | — |
| 3243: 132 | 1651 | Breast | all | 0.105 | — |
| 3243: 138 | 1657 | Breast | all | 0.0133 | √ |
| 3243: 140 | 1659 | Breast | all | 0.0144 | √ |
| 3243: 155 | 1674 | Breast | all | 0.000866 | √ |
| 3243: 182 | 1701 | Breast | all | 0.00148 | √ |
| 3243: 229 | 1748 | Breast | all | 0.00163 | √ |
| 3243: 252 | 1771 | Breast | all | 0.0695 | — |
| 3243: 263 | 1782 | Breast | all | 0.0194 | √ |
| 3243: 311 | 1830 | Breast | all | 0.0102 | √ |
| 3243: 392 | 1911 | Breast | all | NA | — |

[0348] TABLE 58
(3244)

| Position of | Position of | | from | | outstanding |
|---|---|---|---|---|---|
| MVP within | MVP within | iden- | other | | marker |
| amplificate | ROI | tifies | types | P value | position |
| 3244: 40 | 141 | Muscle | all | 0.0149 | √ |
| 3244: 79 | 180 | Muscle | all | 0.714 | — |
| 3244: 173 | 274 | Muscle | all | 0.000189 | √ |
| 3244: 208 | 309 | Muscle | all | 0.00001990 | √ |
| 3244: 217 | 318 | Muscle | all | 0.00000993 | √ |
| 3244: 223 | 324 | Muscle | all | 0.00001990 | √ |
| 3244: 228 | 329 | Muscle | all | 0.0048 | √ |
| 3244: 240 | 341 | Muscle | all | 0.00252 | √ |

[0349] TABLE 59
(3252)

| Position of | Position of | | | | outstanding |
|---|---|---|---|---|---|
| MVP within | MVP within | | | | marker |
| amplificate | ROI | identifies | from other types | P value | position |
| 3252: 39 | 740 | breast, muscle | all | 0.251 | — |
| 3252: 43 | 744 | breast, muscle | all | 0.508 | — |
| 3252: 88 | 789 | breast, muscle | all | 0.000727 | √ |
| 3252: 91 | 792 | breast, muscle | all | 0.000777 | √ |
| 3252: 94 | 795 | breast, muscle | all | 0.192 | — |
| 3252: 152 | 853 | breast, muscle | all | 0.00432 | √ |
| 3252: 164 | 865 | breast, muscle | all | 0.00191 | √ |
| 3252: 175 | 876 | breast, muscle | all | 0.00113 | √ |
| 3252: 178 | 879 | breast, muscle | all | 0.0000139 | √ |
| 3252: 199 | 900 | breast, muscle | all | 0.00449 | √ |
| 3252: 206 | 907 | breast, muscle | all | 0.000445 | √ |
| 3252: 242 | 943 | breast, muscle | all | 0.0079 | √ |
| 3252: 297 | 998 | breast, muscle | all | 0.00325 | √ |
| 3252: 303 | 1004 | breast, muscle | all | 0.0107 | √ |
| 3252: 308 | 1009 | breast, muscle | all | 0.04 | √ |
| 3252: 330 | 1031 | breast, muscle | all | 0.0118 | √ |
| 3252: 334 | 1035 | breast, muscle | all | 0.0135 | √ |
| 3252: 347 | 1048 | breast, muscle | all | 0.865 | — |

[0350] TABLE 60
(3265)

| Position of | Position of | | from | | outstanding |
|---|---|---|---|---|---|
| MVP within | MVP within | | other | | marker |
| amplificate | ROI | identifies | types | P value | position |
| 3265: 62 | 716 | muscle | all | 0.0285 | √ |
| 3265: 81 | 735 | muscle | all | 0.0393 | √ |
| 3265: 84 | 738 | muscle | all | 0.000496 | √ |
| 3265: 137 | 791 | muscle | all | 0.00386 | √ |
| 3265: 139 | 793 | muscle | all | 0.137 | — |
| 3265: 259 | 913 | muscle | all | 0.00383 | √ |
| 3265: 337 | 991 | muscle | all | 0.0499 | √ |
| 3265: 350 | 1004 | muscle | all | 0.0195 | √ |
| 3265: 362 | 1016 | muscle | all | 0.00732 | √ |
| 3265: 395 | 1049 | muscle | all | 0.00131 | √ |
| 3265: 404 | 1058 | muscle | all | 0.0547 | — |

[0351] TABLE 61
(3291)

| Position of | Position of | | from | | outstanding |
|---|---|---|---|---|---|
| MVP within | MVP within | | other | | marker |
| amplificate | ROI | identifies | types | P value | position |
| 42 | 247 | brain | all | 0.0461 | √ |
| 64 | 269 | brain | all | 0.121 | — |
| 71 | 276 | brain | all | 0.00305 | √ |
| 81 | 286 | brain | all | 0.0113 | √ |
| 369 | 574 | brain | all | 0.0304 | √ |

[0352] TABLE 62
(3312)

| Position of | Position of | | from | | outstanding |
|---|---|---|---|---|---|
| MVP within | MVP within | | other | | marker |
| amplificate | ROI | identifies | types | P value | position |
| 3312: 71 | 1498 | liver | all | 0.000433 | √ |
| 3312: 95 | 1522 | liver | all | 0.000429 | √ |
| 3312: 103 | 1530 | liver | all | 0.0131 | √ |
| 3312: 119 | 1546 | liver | all | NA | — |
| 3312: 158 | 1585 | liver | all | 0.0738 | — |
| 3312: 167 | 1594 | liver | all | 0.00331 | √ |
| 3312: 193 | 1620 | liver | all | 0.0092 | √ |
| 3312: 215 | 1642 | liver | all | 0.0222 | √ |
| 3312: 223 | 1650 | liver | all | NA | — |
| 3312: 242 | 1669 | liver | all | NA | — |
| 3312: 259 | 1686 | liver | all | 0.456 | — |
| 3312: 273 | 1700 | liver | all | 0.735 | — |
| 3312: 314 | 1741 | liver | all | 0.967 | — |
| 3312: 404 | 1831 | liver | all | 0.867 | — |
| 3312: 412 | 1839 | liver | all | NA | — |

[0353] TABLE 63
(3329)

| Position of | Position of | | from | | outstanding |
|---|---|---|---|---|---|
| MVP within | MVP within | | other | | marker |
| amplificate | ROI | identifies | types | P value | position |
| 3329: 52 | 1151 | liver | all | NA | — |
| 3329: 135 | 1234 | liver | all | 0.0182 | √ |
| 3329: 154 | 1253 | liver | all | 0.0216 | √ |
| 3329: 187 | 1286 | liver | all | 0.0191 | √ |
| 3329: 241 | 1340 | liver | all | 0.0206 | √ |
| 3329: 251 | 1350 | liver | all | 0.0144 | √ |
| 3329: 303 | 1402 | liver | all | 0.0219 | √ |
| 3329: 315 | 1414 | liver | all | 0.027 | √ |
| 3329: 420 | 1519 | liver | all | 0.777 | — |
| 3329: 440 | 1539 | liver | all | 0.278 | — |

[0354] TABLE 64
(3330)

| Position of | Position of | | from | | outstanding |
|---|---|---|---|---|---|
| MVP within | MVP within | | other | | marker |
| amplificate | ROI | identifies | types | P value | position |
| 3330: 45 | 2033 | lung | muscle | 0.0254 | √ |
| 3330: 127 | 2115 | lung | muscle | 0.0212 | √ |
| 3330: 151 | 2139 | lung | muscle | 0.00794 | √ |
| 3330: 251 | 2239 | lung | muscle | 0.0952 | — |
| 3330: 260 | 2248 | lung | muscle | 0.00794 | √ |
| 3330: 265 | 2253 | lung | muscle | 0.151 | — |
| 3330: 298 | 2286 | lung | muscle | 0.0159 | √ |
| 3330: 311 | 2299 | lung | muscle | 0.0097 | √ |
| 3330: 320 | 2308 | lung | muscle | 0.00794 | √ |
| 3330: 394 | 2382 | lung | muscle | 0.00749 | √ |
| 3330: 401 | 2389 | lung | muscle | 0.156 | — |

[0355] TABLE 65
(3347)

| | Position of | | | | |
|---|---|---|---|---|---|
| Position of | MVP | | from | | outstanding |
| MVP within | within | | other | | marker |
| amplificate | ROI | identifies | types | P value | position |
| 3347: 32 | 1907 | muscle, brain | all | 0.0917 | — |
| 3347: 63 | 1938 | muscle, brain | all | 0.00198 | √ |
| 3347: 65 | 1940 | muscle, brain | all | 0.063 | — |
| 3347: 71 | 1946 | muscle, brain | all | 0.525 | — |
| 3347: 85 | 1960 | muscle, brain | all | 0.018 | √ |
| 3347: 92 | 1967 | muscle, brain | all | 0.00117 | √ |
| 3347: 100 | 1975 | muscle, brain | all | 0.0173 | √ |
| 3347: 103 | 1978 | muscle, brain | all | 0.00232 | √ |
| 3347: 105 | 1980 | muscle, brain | all | 0.00776 | √ |
| 3347: 111 | 1986 | muscle, brain | all | 0.00825 | √ |
| 3347: 127 | 2002 | muscle, brain | all | 0.00412 | √ |
| 3347: 133 | 2008 | muscle, brain | all | 0.0132 | √ |
| 3347: 185 | 2060 | muscle, brain | all | 0.00307 | √ |
| 3347: 232 | 2107 | muscle, brain | all | 0.0769 | — |
| 3347: 342 | 2217 | muscle, brain | all | 0.00181 | √ |
| 3347: 351 | 2226 | muscle, brain | all | 0.0062 | √ |

[0356] TABLE 66
(3348)

| Position of | Position of | | from | |
|---|---|---|---|---|
| MVP within | MVP within | | other | |
| amplificate | ROI | identifies | types | P value |
| 3348: 95 | 1651 | liver | all | NA |
| 3348: 112 | 1668 | liver | all | NA |
| 3348: 131 | 1687 | liver | all | NA |
| 3348: 154 | 1710 | liver | all | NA |
| 3348: 347 | 1903 | liver | all | NA |
| 3348: 352 | 1908 | liver | all | NA |
| 3348: 355 | 1911 | liver | all | NA |
| 3348: 361 | 1917 | liver | all | NA |
| 3348: 370 | 1926 | liver | all | NA |
| 3348: 397 | 1953 | liver | all | NA |
| 3348: 439 | 1995 | liver | all | NA |
| 3348: 445 | 2001 | liver | all | NA |

[0357] TABLE 67
(3364)

| | Position of | | | | |
|---|---|---|---|---|---|
| Position of | MVP | | from | | outstanding |
| MVP within | within | | other | | marker |
| amplificate | ROI | identifies | types | P value | position |
| 3364: 33 | 1921 | brain | all | 0.0289 | √ |
| 3364: 117 | 2005 | brain | all | 0.566 | — |
| 3364: 142 | 2030 | brain | all | 0.00399 | √ |
| 3364: 163 | 2051 | brain | all | 0.000004760 | √ |
| 3364: 168 | 2056 | brain | all | 0.000311 | √ |
| 3364: 204 | 2092 | brain | all | 0.043 | √ |
| 3364: 251 | 2139 | brain | all | 0.0023 | √ |
| 3364: 423 | 2311 | brain | all | 0.000826 | √ |
| 3364: 431 | 2319 | brain | all | 0.169 | — |
| 3364: 445 | 2333 | brain | all | 0.00148 | √ |
| 3364: 471 | 2359 | brain | all | 0.365 | — |
| 3364: 474 | 2362 | brain | all | 0.404 | — |

[0358] TABLE 68
(3374)

| | Position of | | | | out- |
|---|---|---|---|---|---|
| Position of | MVP | | from | | standing |
| MVP within | within | | other | | marker |
| amplificate | ROI | identifies | types | P value | position |
| 3374: 38 | 979 | breast, muscle | all | 0.00165 | √ |
| 3374: 89 | 1030 | breast, muscle | all | 0.000046800 | √ |
| 3374: 98 | 1039 | breast, muscle | all | 0.0101 | √ |
| 3374: 117 | 1058 | breast, muscle | all | 0.00102 | √ |
| 3374: 238 | 1179 | breast, muscle | all | 0.766 | — |
| 3374: 255 | 1196 | breast, muscle | all | 0.525 | — |
| 3374: 280 | 1221 | breast, muscle | all | 0.0562 | — |
| 3374: 309 | 1250 | breast, muscle | all | 0.0906 | — |
| 3374: 350 | 1291 | breast, muscle | all | 0.0554 | — |
| 3374: 449 | 1390 | breast, muscle | all | 0.947 | — |

[0359] TABLE 69
(3377)

| Position of | Position of | | from | | outstanding |
|---|---|---|---|---|---|
| MVP within | MVP within | | other | | marker |
| amplificate | ROI | identifies | types | P value | position |
| 3377: 30 | 2036 | breast | all | NA | — |
| 3377: 83 | 2089 | breast | all | 0.393 | — |
| 3377: 109 | 2115 | breast | all | 1 | — |
| 3377: 183 | 2189 | breast | all | 0.156 | — |
| 3377: 222 | 2228 | breast | all | 0.0842 | — |
| 3377: 235 | 2241 | breast | all | 0.0263 | √ |
| 3377: 261 | 2267 | breast | all | 0.139 | — |
| 3377: 270 | 2276 | breast | all | 0.0148 | √ |
| 3377: 272 | 2278 | breast | all | 0.0225 | √ |
| 3377: 275 | 2281 | breast | all | 0.00537 | √ |
| 3377: 327 | 2333 | breast | all | 0.208 | — |

[0360] TABLE 70
(3382)

| | Position | | | | |
|---|---|---|---|---|---|
| | of | | | | |
| Position of | MVP | | from | | outstanding |
| MVP within | within | | other | | marker |
| amplificate | ROI | identifies | types | P value | position |
| 3382: 33 | 1224 | brain, breast | all | 0.0284 | √ |
| 3382: 42 | 1233 | brain, breast | all | 0.311 | — |
| 3382: 63 | 1254 | brain, breast | all | 0.0775 | — |
| 3382: 231 | 1422 | brain, breast | all | 0.000001370 | √ |
| 3382: 248 | 1439 | brain, breast | all | 0.000003850 | √ |
| 3382: 257 | 1448 | brain, breast | all | 0.000331 | √ |
| 3382: 263 | 1454 | brain, breast | all | 6.38E−07 | √ |
| 3382: 284 | 1475 | brain, breast | all | 0.00073 | √ |
| 3382: 302 | 1493 | brain, breast | all | 0.00394 | √ |
| 3382: 308 | 1499 | brain, breast | all | 0.000000099 | √ |
| 3382: 314 | 1505 | brain, breast | all | 0.000719 | √ |
| 3382: 326 | 1517 | brain, breast | all | 0.00016 | √ |
| 3382: 332 | 1523 | brain, breast | all | 0.0108 | √ |
| 3382: 347 | 1538 | brain, breast | all | 0.00285 | √ |

[0361] The following examples provide a description of how the above disclosed markers are used for identification, classification or cataloguing of a tissue, and/or for distinguishing between or among tissues of different tissue types.

### EXAMPLE 2

### The Marker ROI 3083 and the Attendant Epigenetic Map is Used to Identify Liver Tissue as the Source of Origin of a Sample Containing Genomic DNA. A HeavyMethyl™ Assay is Used for Differentiation of Liver Tissue Amongst Other Tissues

[0362] The experiments of the following example occur in the setting of a diagnostic laboratory where two tubes, each containing isolated genomic DNA from one of two different tissue samples, are accidentally randomized. It is known, however, that one sample is obtained from a liver biopsy (intended for use in a molecular cancer test), whereas the other sample is derived from muscle cells of a dead body (intended for use with a SNP-based test for forensic studies). A lack of sufficient tissue material to repeat the extraction (DNA isolation) leads to a decision to quickly test each DNA for its source of origin using one of the inventive liver markers out of a group of several, as disclosed herein above according to the present invention.

[0363] According to the present invention, the marker used is the ROI 3083 (nt 571 to nt 3071 in properdin (BF); gene accession gi: 25070930). As disclosed herein, specific regions of said gene are unmethylated in liver but methylated in other tissues (see Tables 3 and 37, herein above). It is also disclosed that this can be utilized in a test by performing a sensitive detection assay (e.g., HeavyMethyl™ assay) on said ROI according to the present invention. To perform such an assay, the primers, probes and blockers are first designed using the sequence information given in SEQ ID NOS:1 and 2. The following primers, probes and blockers are designed using ROI SEQ ID NO:1 as template:

[0364] forward primer: (SEQ ID NO:206; 5′-GGG GTT TTA GGT TTT AGT GTT TAT TT-3′);

[0365] reverse primer: (SEQ ID NO:207; 5′-CTC CAA AAA CCA CCT TCC TAA CAC-3′);

[0366] blocker oligonucleotide: (specific to block amplification of CG containing template) (SEQ ID NO:218; 5′-CCT AAC ACg TTCg CCg CTA AAA ACC ACg CAA AAT AAA CC-3′);

[0367] blocker oligonucleotide control: (specific to block amplification of TG containing template) (SEQ ID NO:210; 5′-CCT AAC ACa TTC aCC aCT AAA AAC CAC aCA AAA TAA ACC-3′);

[0368] fluorescein anchor probe: (SEQ ID NO:216; 5′-AAT TtG GGT ATT TTT ATT GGT ATA AGG AAG GTG GGT AG-fluo);

[0369] detection probe: (SEQ ID NO:217; red640-GTA TtG TTT TGA AGA TAG tGT TAT TTA TTA TTG TAG TtG G-phosphate;

[0370] fluorescein anchor probe—control; (SEQ ID NO:208; 5′-AAT TCG GGT ATT TTT ATT GGT ATA AGG AAG GTG GGT AG-fluo); and

[0371] detection probe—control: (SEQ ID NO:209; red640-GTA TCG TTT TGA AGA TAG CGT TAT TTA TTA TTG TAG TCG G-phosphate).

The test (for determining the DNA source) is performed as follows:

[0372] Genomic DNA from one of these samples is treated with a solution of bisulfite as described in Olek et al. Nucleic Acids Res. 24:5064-6, 1996. As a result of this treatment, cytosine bases that are unmethylated are converted to thymine. The amount of DNA after bisulfite treatment is measured by UV absorption at 260 nm. About 100 pg of the pretreated DNA is used as template.

[0373] The HeavyMethyl™ assay is performed in a total volume of 20 μl using a LightCycler™ device (Roche Diagnostics). The real-time PCR reaction mix contains: 10 μl of template DNA (500 pg in total); 2 μl of FastStart LightCycler™ reaction mix for hybridization probes (Roche Diagnostics, Penzberg); 0.30 μM forward primer (SEQ ID NO:206; 5′-GGG GTT TTA GGT TTT AGT GTT TAT TT-3′); 0.30 μM reverse primer (SEQ ID NO:207; 5′-CTC CAA AAA CCA CCT TCC TAA CAC-3′); 0.15 μM fluorescein anchor probe (SEQ ID NO:216; 5′-AAT TtG GGT ATT TTT ATT GGT ATA AGG AAG GTG GGT AG-fluo; TIB-MolBiol, Berlin); 0.15 μM detection probe (SEQ ID NO:217; red640-GTA ttG ttT TGA AGA tAG tGT tAt tTA ttA tTG tAG ttG G-phosphate; TIB-MolBiol, Berlin); 1 μM blocker oligonucleotide (SEQ ID NO:218; 5′-CCT AAC Acg TTC gCC gCT AAA AAC CAC gCA AAA TAA ACC-3′); and 3 mM MgCl₂.

[0374] As a control, a parallel experiment is performed in a second PCR tube to detect the presence of methylated cytosines in said region. In this case, an amplificate and therefore a fluorescent signal, would indicate that the DNA is derived from a tissue other than liver, as for example brain or breast tissue. The real-time PCR reaction mix contains: 10 μl of template DNA (500 pg in total); 2 μl of FastStart LightCycler™ reaction mix for hybridization probes (Roche Diagnostics, Penzberg); 0.30 μM forward primer (SEQ ID NO:206; 5′-GGG GTT TTA GGT TTT AGT GTT TAT TT-3′); 0.30 μM reverse primer (SEQ ID NO:207; 5′-CTC CAA AAA CCA CCT TCC TAA CAC-3′); 0.15 μM fluorescein anchor probe (SEQ ID NO:208; 5′-AAT TCG GGT ATT TTT ATT GGT ATA AGG AAG GTG GGT AG-fluo; TIB-MolBiol, Berlin); 0.15 μM detection probe (SEQ ID NO:209; red640-GTA tCG ttT TGA AGA tAG CGT tAt tTA ttA tTG tAG tCG G-phosphate; TIB-MolBiol, Berlin); 1 μM blocker oligonucleotide (SEQ ID NO:210; 5′-CCT AAC ACA TTC ACC ACT AAA AAC CAC ACA AAA TAA ACC-3′); and 3 mM MgCl₂.

[0375] Thermocycling conditions are the same in both cases, and begin with a 95° C. incubation for 10 minutes, then 55 cycles of the following steps: 95° C. for 10 seconds, 56° C. for 30 seconds, and 72° C. for 10 seconds. Fluorescence is detected after the annealing phase at 56° C. in each cycle, however, only for the non-methylation sensitive assay (at the top) an intense signal can be achieved. From comparing this result with the data disclosed herein (see FIG. 1, and see Tables 3 and 37, herein above), it is concluded that the DNA analyzed is derived from liver.

### EXAMPLE 3

### The Marker ROI 3105 and the Attendant Epigenetic Map is Used in a Sensitive Detection Assay for Unambiguous Identification of Breast Tissue as the Source of Origin of Genomic DNA. A HeavyMethyl™ Assay is Used for Differentiation of Breast Tissue Amongst Other Tissues

[0376] The experiments of this example are in the context of a diagnostic laboratory, where two tubes arrive at the same day from the same practitioner, who has sent in biopsy samples from two of his female patients both named Smith. No other description is deciphered, but it is known that one sample is taken from a breast biopsy (to monitor the clearance of tumor cells after surgical removal and radiation therapy), whereas the other sample comes from a lung biopsy. The genomic DNA is already isolated when the ambiguity is noticed, so that a visual differentiation is no longer possible.

[0377] According to the present invention, only a quick test employing one of the breast markers disclosed herein is required to determine which DNA belonges to which patient Smith. The marker ROI 3105 (nt 512 to nt 3012 of DAXX gene, accession GI:3319283) is chosen, as it clearly differentiates between breast, which is highly unmethylated, and lung (or liver or brain) tissue, which is methylated to a higher degree (see Tables 10 and 44, herein above). The sequence information disclosed herein (3105 in SEQ ID NOS:15 and 16 and SEQ ID NOS:83 und 84), combined with the position of the MVPs, allows for the design of an appropriate assay (e.g., a HeavyMethyl™ assay, as described below).

[0378] Genomic DNA from the two samples is treated with a solution of bisulfite as it is described in Olek et al. Nucleic Acids Res. 1996 Dec. 15;24(24):5064-6. As a result of this treatment, cytosine bases that are unmethylated are converted to thymine. The amount of DNA after bisulfite treatment is measured by UV absorption at 260 nm, and 100 pg of the pretreated DNA is used as template.

[0379] The HeavyMethyl™ assay specific for unmethylated MVPs is performed in a total volume of 20 μl using a LightCycler™ device (Roche Diagnostics). The real-time PCR reaction mix contains: 10 μl of template DNA (100 pg in total); 2 μl of FastStart LightCycler™ reaction mix for hybridization probes (Roche Diagnostics, Penzberg); 0.30 μM forward primer (SEQ ID NO:211; 5′-GTA TTT TGA GTT ATG AGT TGG AGT TGT TGT-3′); 0.30 μM reverse primer (SEQ ID NO:212; 5′-AAC TAT ATA AAC TAA AAA ACT ACT CTT CAC TAACC-3′); 0.15 μM fluorescein anchor probe (SEQ ID NO:219; 5′-TTT GGT TTG TTG ATG AGT TGT TTA ATG TGT T-fluo; TIB-MolBiol, Berlin); 0.15 μM detection probe (SEQ ID NO:220; red640-TTA ATT TTT GGG TAG TGG GTG TTA TGG TA-phosphate; TIB-MolBiol, Berlin); 1 μM blocker oligonucleotide (SEQ ID NO:221; 5′-CTC TTC ACT AAC CgA CCg TAT CAT AAA ACA ACg CAT CCc-3′); and 3 mM MgCl₂.

[0380] An intense fluorescent signal is detected, indicating that an amplificate is obtained, which demonstrates that the methylation specific blocker employed in this assay is not binding to the template, indicating that the template contains TGs instead of CGs. From knowing that the MVPs covered by the blocker's sequence are unmethylated, it is concluded, by comparing the result with FIG. 8 or Table 10, that the sample DNA is derived from breast tissue.

[0381] As a control, a parallel experiment is performed in a second PCR tube to detect the presence of methylated cytosines in said region. The HeavyMethyl™ assay specific for upmethylated MVP is performed in a total volume of 20 μl using a LightCycler™ device (Roche Diagnostics). The real-time PCR reaction mix contains; 10 μl of template DNA (100 pg in total); 2 μl of FastStart LightCycler™ reaction mix for hybridization probes (Roche Diagnostics, Penzberg); 0.30 μM forward primer (SEQ ID NO:211; 5′-GTA TTT TGA GTT ATG AGT TGG AGT TGT TGT-3′); 0.30 μM reverse primer (SEQ ID NO:212; 5′-AAC TAT ATA AAC TAA AAA ACT ACT CTT CAC TAA CC-3′); 0.15 μM fluorescein anchor probe (SEQ ID NO:213; 5′-TTT GGT TTG TTG ATG AGT CGT TTA ATG CGT T-fluo; TIB-MolBiol, Berlin); 0.15 μM detection probe (SEQ ID NO:214; red640-TTA ATT TTT GGG TAG CGG GTG TTA CGG TA-phosphate; TIB-MolBiol, Berlin); 1 μM blocker oligonucleotide (SEQ ID NO:215; 5′-CTC TTC ACT AAC CAA CCA TAT CAT AAA ACA ACA CAT CCc-3′); and 3 mM MgCl₂.

[0382] Thermocycling conditions begin with a 95° C. incubation for 10 minutes, then 55 cycles of the following steps: 95° C. for 10 seconds, 56° C. for 30 seconds, and 72° C. for 10 seconds. Fluorescence is detected after the annealing phase at 56° C. in each cycle.

[0383] In this case an amplificate and hence a fluorescent signal, would indicate that the DNA is derived from a tissue other than breast, as for example brain, liver or lung tissue. No signal can be detected here, however.

[0384] The sample analyzed can be identified as DNA from breast tissue and therefore further analyses on both samples as demanded by the practitioner are enabled.

[0385] It is preferred, that the assays are performed as duplex PCR assays which enable the quantitative determination of the amount of a specific ROI sequence, methylated prior to bisulfite treatment, by methylation-specific amplification of the ROI fragment. The additional determination of the total amount of template DNA can be achieved by employing a suitable control fragment as template in a simultaneously performed control PCR in the same real-time PCR tube.

### EXAMPLE 4

### The Location/source of Free-floating DNA is Detected by a Sensitive Analysis Method

[0386] The experiments of the following example involve a blood sample that is taken from a patient who becomes aware of the fact that he has been exposed to high levels of radiation during his years of service in the army. Now the patient wishes to know whether he has developed a neoplastic disease like a tumour. His physician has not yet found any typical symptoms other than the patient complaining about unspecific pain at different organs, including headache.

[0387] A 20 ml blood sample is collected in heparin. Plasma and lymphocytes are separated by Ficoll gradient. Control lymphocyte and plasma DNA are purified on Qiagen columns (Qiamp Blood Kit, Qiagen, Basel, Switzerland) according to the “blood and body fluid protocol”. Plasma is passed on the same column. After purification of about 10 ml of plasma, 350 ng of DNA are obtained. The DNA is subjected to a sodium bisulfite treatment as described in Olek A, et al., Nucleic Acids Res. 24:5064-6, 1996. Aliquots of this bisulfite-treated DNA are used for a set of methylation assays.

[0388] The regions analyzed are picked from the FIGS. 1-34. ROIs 3083 (BF, FIG. 1), 3152 (HLA-DMA, FIG. 15), 3170 (HLA-DRB3, FIG. 16), 3243 (TNF, FIG. 21), 3244 (TNXB, FIG. 22), and 3382 (DDX16, FIG. 34) are selected. Those sections of those ROIs that comprise a number of at least three MVPs are analyzed with an assay suitable to detect the levels of methylation at the MVPs disclosed (e.g., the MSP assay, or the HeavyMethyl™ assay). The individual's test result is compared with the dataset disclosed in FIGS. 1, 15, 16, 21, 22 and 34 and Tables 3, 17, 18, 23, 24 and 36. From these, it is concluded that a significant portion of the DNA in the patient's blood is derived from his lung. In this case, a single assay on ROI 3170 as template would also be sufficient, however, because it is not known that the free floating DNA was derived from lung, it is necessary to screen with a couple of markers at a time to get an accurate reliable result as fast as possible. Said result is sent back to the physician who then refers the patient to a hospital specializing in inflammatory or cell proliferative diseases of the lung.

### EXAMPLE 5

### A Routine Testing Assay is Introduced into a Tissue Analysis Laboratory

[0389] The experiments of the following example are performed in the context of a tissue analysis laboratory that works on a high-throughput basis, to introduce a step of quality assurance into the process. The quality assurance step comprises a routine testing of every tissue sample arriving at the laboratory, and prior to the sample entering the different analytical ‘tracks’ required for its further analyses. With the qualtity assurance step, the lab confirms the nature of the sample by an easy test on a molecular level.

[0390] According to the present invention, genomic DNA from each sample is extracted and treated with bisulfite as described herein above. The bisulfite-treated DNA is then prepared for sequence analysis runs.

[0391] ROIs 3083 (FIG. 1), 3152 (FIG. 15), 3170 (FIG. 16), 3243 (FIG. 21), 3244 (FIG. 22), and 3382 (FIG. 34) are selected. Each ROI is sequenced at those sections (regions) containing the MVPs disclosed. The primer pairs SEQ ID NOS:137, 138, 165, 166, 167, 168, 177, 178, 179, 180 and 203, 204, given in table 1, are used as sequencing primers.

[0392] Each section is sequenced once from both ends. Therefore, 12 sequencing runs are analyzed. Each test result is compared with the dataset disclosed in FIGS. 1, 15, 16, 21, 22 and 34 and Tables 3, 17, 18, 23, 24 and 36.

[0393] Further analysis of the sample in various analytical tracts will only be started if these quality assurance results confirm the sample information given upon arrival of the sample at the laboratory.

### EXAMPLE 6

### Forensic Case

[0394] The experiments of this example are performed in the context of a forensic case, where one of the relevant pieces of evidence was a piece of tissue that was found attached to a knife, suspected to be the weapon that killed a victim. For this case, it is of high importance to identify the kind of tissue that is attached to the knife, as there are several suspects, all of whom wounded the victim with their respective knives. The deadly wound was rendered by the knife that attacked the victim's liver. As the material has not been frozen, but is found 2 hot summer days after the murder at the crime scene in New York, the DNA is the material of choice to be used for this kind of analysis.

[0395] According to the present invention, and without great difficulties, intact genomic DNA is isolated from the weapons and a couple of sensitive detection assays (e.g., employing the liver markers ROI 3312 (gene SKIV2L) and ROI 3348 (gene DDX16), and the muscle markers 3265 and 3347 (both within genomic clone DASS-97D12)) are used to reveal whether the respective tissues in question are indeed derived from liver and not from muscle. Two MSP/MethyLight™ assays are designed to detect the methylation levels in said tissue, and are designed to only amplify a product that is detected by a Taqman™ probe.

[0396] According to the present invention, the tissue sample of the murder weapon may be contaminated with muscle tissue, but when compared to a pure muscle sample that is used as a control, the difference in signal intensities facilitates identification of the murder weapon, and makes it a clear case.

### EXAMPLE 7

### Computer and On-line Applications of the Present Invention; Online Epigenomic Map Subscription Service

[0397] In particular embodiments, the present invention relates to information systems theories and expert systems theories. The present invention provides a method and apparatus for providing information on samples comprising genomic DNA (e.g., DNA, cells, tissues, bodily fluids, etc.) to a user or subscriber. The method and apparatus allows for identifying, or for distinguishing between or among such samples, based on a database containing tissue-specific quantitative methylation data.

[0398] The quantitative methylation data is initially afforded by using DNA sequence trace analysis software, such as the preferred ESME embodiment described herein. ESME is a software program that considers or accounts for the unequal distribution of bases in bisulfite converted DNA and normalizes the sequence traces (electropherograms) to allow for quantitation of methylation signals within the sequence traces. Additionally, it calculates a bisulfite conversion rate, by comparing signal intensities of thymines at specific positions, based on the information about the corresponding untreated DNA sequence.

[0399] In preferred embodiments, the invention provides a computer implemented method for providing information on tissue specimens to a user or subscriber comprising: obtaining DNA, cell or tissue samples corresponding to a plurality of tissue types from a subset of a population of subjects with shared characteristics, said samples having genomic DNA; assaying the genomic DNA of each of the tissue samples; determining for each tissue type, based on said assaying, a distribution of values for each of location, type and level of methylated CpG positions within one or more genomic DNA regions; calculating average indices for each of the distribution of values; calculating dispersion indices for each of the average indices; storing the average indices and dispersion indices in a database; and providing to the user or subscriber, in exchange for a fee, access to said average indices and dispersion indices in said database, wherein the number of tissue samples includes a sufficient number of samples such that the dispersion and average indices correspond to a statistically significant representation of those indices for the population as a whole.

[0400] Preferably, the tissue samples comprise normal tissue, or abnormal tissue. Preferably, where the tissue samples comprise normal and abnormal tissue of the same tissue type, data from normal tissue is used to determine a distribution of values and corresponding indices for normal tissue, and data from abnormal tissue is used to determine a distribution of values and corresponding indices for abnormal tissue. Preferably, the tissue types comprise a type selected from the group consisting of breast, liver, prostate, muscle, brain, lung and combinations thereof.

[0401] Consumers do not have an intelligent, fast and reliable method for accessing quantified methylation-based information services. The present invention addresses this need by creating a software program able to link the consumer/user to one or more functional epigenomic databases, such as an ‘MVP database’. An MVP database refers to a database containing the methylation levels and an epigenomic database comprising locations of differentially methylated CpG positions, in relation to the detailed description of samples including, for example, all, or a portion of all available phenotypical characteristics, and clinical parameters. The database is searchable, for example, for CpG positions that are differentially methylated between or among two or more phenotypically distinct types of tissues/samples. A consumer can access the Internet using a computer or electronic hand-held device. The software program of the present invention is usable in a stand-alone computer system.

[0402] The apparatus of the present invention is a computer, or computer network comprising a server, at least one user subsystem connected to the server via a network connecting means (e.g., user modem). Although referred to as a modem, the user modem can be any other communication means that enables network communication, for example, ethernet links. The modem can be connected to the server by a variety of connecting means, including public telephone land lines, dedicated data lines, cellular links, microwave links, or satellite communication.

[0403] The server is essentially a high-capacity, high-speed computer that includes a processing unit connected to one or more relatable data bases, comprising an “MVP database” that contains methylation levels, and an epigenomic database comprising locations of differentially methylated CpG positions (MVP positions), in relation to the detailed description of samples including, for example, all, or a portion of all available phenotypical characteristics, and clinical parameters. The database is searchable, for example, for CpG positions that are differentially methylated between or among two or more phenotypically distinct types of tissues/samples. Additional databases are optionally added to the server. For example, a searchable database comprising a listing of which MVP positions have utility for distinguishing between which sample types may be included.

[0404] Also connected to the processing unit is sufficient memory and appropriate communication hardware. The communication hardware may be modems, ethernet connections, or any other suitable communication hardware. Although the server can be a single computer having a single processing unit, it is also possible that the server could be spread over several networked computers, each having its processor and having one or more databases resident thereon.

[0405] In addition to the elements described above, the server further comprises an operating system and communication software allowing the server to communicate with other computers. Various operating systems and communication software may be employed. For example, the operating system may be Microsoft Windows NT™, and the communication software Microsoft IIS™ (Internet Information Server) server with associated programs.

[0406] The databases on the server contain the information necessary to make the apparatus and process work. The databases are relatable and are assembled and accessed using any commercially available database software, such as Microsoft Access™, Oracle™, Microsoft SQL™ Version 6.5, etc.

[0407] A user subsystem generally includes a processor attached to storage unit, a communication controller, and a display controller. The display controller runs a display unit through which the user interacts with the subsystem. In essence, the user subsystem is a computer able to run software providing a means for communicating with the server. This software, for example, is an Internet web browser such as Microsoft Internet Explorer, Netscape Navigator, Mozilla, or other suitable Internet web browsers. The user subsystem can be a computer or hand-held electron device, such as a telephone or other device allowing for Internet access.

[0408] Particular embodiments comprise a basic computer model with a central processing unit (“CPU”), Hard Storage (“Hard Disk”), Soft Storage (“RAM”), and an Input and Output interface (“Input/Output”). A consumer/user, at a user interface, is either interested in specific information, access to services, or is concerned about identification or differentiation of one or more samples. Once they log on to a host site, a main window screen is displayed giving the options to login as a registered user, use a ‘smart’ search, or directly access the online epigenomic map subscription service interface. In preferred embodiments, the system is implemented as a full, interactive service.

1. A method for generating a genome-wide methylation map, comprising:
a) obtaining, for each of at least two biological sample types, a plurality or group of biological samples having genomic DNA;
b) pretreating the genomic DNA of the samples by contacting the samples, or isolated DNA from the samples, with an agent, or series of agents that modifies unmethylated cytosine but leaves methylated cytosine essentially unmodified;
c) amplifying segments of the pretreated DNA, said amplified segments representing the entire genome, or a portion thereof, and comprising in each case at least one dinucleotide sequence position corresponding to a CpG dinucleotide position in the corresponding untreated genomic DNA, and wherein said amplification is by means of primer molecules that do not comprise a dinucleotide sequence position corresponding to a CpG dinucleotide position in the corresponding untreated genomic DNA;
d) sequencing the amplified pretreated nucleic acids;
e) analyzing the sequences to quantify a level of methylation at specific CpG positions;
f) comparing said quantified levels of methylation at specific CpG positions between the different sample groups corresponding to the at least two biological sample types; and
g) identifying methylation variable positions, wherein a methylation variable position is a genomic CpG position, for which there is a detectable difference in the quantified level of methylation between different biological sample types, and whereby an epigenomic map over the entire genome, or a portion thereof is, at least in part, afforded.

2. The method of claim 1, wherein the biological sample type is of a tissue, organ or cell.

3. The method of claim 1, wherein in c), the dinucleotide sequence position corresponding to a CpG dinucleotide position in the corresponding untreated genomic DNA is a CpG or a TpG dinucleotide sequence position.

4. The method of claim 1, wherein sequencing in d) comprises generating a sequence trace, or electropherogram for use in quantifying the level of methylation.

5. The method of claim 1, wherein analyzing the sequences in e), comprises creating a profile of the quantified level of methylation over the entire genome, or a portion thereof.

6. The method of any one of the above claims, wherein quantifying the level of methylation in e) involves the use of a software program suitable therefore.

7. The method of claim 6, wherein the suitable software program is ESME, which considers or accounts for an unequal distribution of bases in bisulfite converted DNA and normalizes sequence traces (electropherograms) to allow for quantitation of methylation signals within the sequence traces.

8. The method of claim 1, wherein the agent, or series of agents of b) comprises a bisulfite reagent.

9. The method of claim 1, wherein the agent, or series of agents of b) comprises an enzyme.

10. The method of claim 1, wherein pretreating in b) comprises modification of cytosine to uracil.

11. The method of claim 1, wherein amplifying segments in c), comprises amplification of at least one segment located in, or comprising a regulatory region of a gene.

12. The method of claim 1, wherein amplifying in c) comprises use of a polymerase chain reaction (PCR).

13. A nucleic acid or an oligomer comprising at least one contiguous base sequence having a length of at least 16 nucleotides that is complementary to, or hybridizes under moderately stringent or stringent conditions to a pretreated genomic DNA sequence selected from the group consisting of SEQ ID NOS:1-136, and sequences complementary thereto, wherein said contiguous sequence comprises at least one methylation variable position, or at least one CpG, tpG, or Cpa dinucleotide sequence, and wherein pretreatment comprises treating the genomic DNA with an agent, or series of agents, that modifies unmethylated, but leaves methylated, cytosine essentially unmodified.

14. A set of oligomers, said set comprising a first oligomer and a second oligomer, wherein the first oligomer, and the second oligomer each comprises at least one contiguous base sequence of at least 16 nucleotides in length that is complementary to, or hybridizes under moderately stringent or stringent conditions to a pretreated genomic DNA sequence selected from, in the case of the first oligomer, a first sequence group consisting of SEQ ID NOS:1-136, and selected from, in the case of the second oligomer, a second sequence group consisting of sequences complementary to the sequences of the first sequence group, and wherein pretreatment comprises treating the genomic DNA with an agent, or series of agents, that modifies unmethylated, but leaves methylated, cytosine essentially unmodified.

15. The set of oligomers of claim 14, wherein the set is suitable for use in generating nucleic acid amplificates.

16. A nucleic acid or oligomer, comprising a sequence selected from the group consisting of SEQ ID NOS:137 through 204 and SEQ ID NOS:206 through 221.

17. A nucleic acid or an oligomer comprising at least one contiguous base sequence having a length of at least 16 nucleotides that is complementary to, or hybridizes under moderately stringent or stringent conditions to a pretreated genomic DNA sequence selected from a group consisting of SEQ ID NOS:1, 2, 69, 70; SEQ ID NOS:3, 4, 71, 72; SEQ ID NOS:5, 6, 73, 74; SEQ ID NOS:7, 8, 75, 76; SEQ ID NOS:9, 10, 77, 78; SEQ ID NOS:11, 12, 79, 80; SEQ ID NOS:13, 14, 81, 82; SEQ ID NOS:15, 16, 83, 84; SEQ ID NOS:17, 18, 85, 86; SEQ ID NOS:19, 20, 87, 88; SEQ ID NOS:21, 22, 89, 90; SEQ ID NOS:23, 24, 91, 92; SEQ ID NOS:25, 26, 93, 94; SEQ ID NOS:27, 28, 95, 96; SEQ ID NOS:29, 30, 97, 98; SEQ ID NOS:31, 32, 99, 100; SEQ ID NOS:33, 34, 101, 102; SEQ ID NOS:35, 36, 103, 104; SEQ ID NOS:37, 38, 105, 106; SEQ ID NOS:39, 40, 107, 108; SEQ ID NOS:41, 42, 109, 110; SEQ ID NOS:43, 44, 111, 112; SEQ ID NOS:45, 46, 113, 114; SEQ ID NOS:47, 48, 115, 116; SEQ ID NOS:49, 50, 117, 118; SEQ ID NOS:51, 52, 119, 120; SEQ ID NOS:53, 54, 121, 122; SEQ ID NOS:55, 56, 123, 124; SEQ ID NOS:57, 58, 125, 126; SEQ ID NOS:59, 60, 127, 128; SEQ ID NOS: 61, 62, 129, 130; SEQ ID NOS:63, 64, 131, 132; SEQ ID NOS:65, 66, 133, 134 and SEQ ID NOS:67, 68, 135, 136, and sequences complementary thereto, wherein said contiguous sequence comprises at least one methylation variable position, or at least one CpG, tpG, or Cpa dinucleotide sequence, and wherein pretreatment comprises treating the genomic DNA with an agent, or series of agents, that modifies unmethylated, but leaves methylated, cytosine essentially unmodified.

18. A set of oligomers, said set comprising a first oligomer and a second oligomer, wherein the first oligomer, and the second oligomer each comprises at least one contiguous base sequence of at least 16 nucleotides in length that is complementary to, or hybridizes under moderately stringent or stringent conditions to a pretreated genomic DNA sequence selected from, in the case of the first oligomer, a sequence subgroup selected from a first group of 4-sequence subgroups consisting of SEQ ID NOS:1, 2, 69, 70; SEQ ID NOS:3, 4, 71, 72; SEQ ID NOS:5, 6, 73, 74; SEQ ID NOS:7, 8, 75, 76; SEQ ID NOS:9, 10, 77, 78; SEQ ID NOS:11, 12, 79, 80; SEQ ID NOS:13, 14, 81, 82; SEQ ID NOS:15, 16, 83, 84; SEQ ID NOS:17, 18, 85, 86; SEQ ID NOS:19, 20, 87, 88; SEQ ID NOS:21, 22, 89, 90; SEQ ID NOS:23, 24, 91, 92; SEQ ID NOS:25, 26, 93, 94; SEQ ID NOS:27, 28, 95, 96; SEQ ID NOS:29, 30, 97, 98; SEQ ID NOS:31, 32, 99, 100; SEQ ID NOS:33, 34, 101, 102; SEQ ID NOS:35, 36, 103, 104; SEQ ID NOS:37, 38, 105, 106; SEQ ID NOS:39, 40, 107, 108; SEQ ID NOS:41, 42, 109, 110; SEQ ID NOS:43, 44, 111, 112; SEQ ID NOS:45, 46, 113, 114; SEQ ID NOS:47, 48, 115, 116; SEQ ID NOS:49, 50, 117, 118; SEQ ID NOS:51, 52, 119, 120; SEQ ID NOS:53, 54, 121, 122; SEQ ID NOS:55, 56, 123, 124; SEQ ID NOS:57, 58, 125, 126; SEQ ID NOS:59, 60, 127, 128; SEQ ID NOS:61, 62, 129, 130; SEQ ID NOS:63, 64, 131, 132; SEQ ID NOS:65, 66, 133, 134 and SEQ ID NOS:67, 68, 135, 136, and selected from, in the case of the second oligomer, a corresponding complementary sequence subgroup selected from a second group of 4-sequence subgroups consisting of sequences complementary to the respective subgroup sequences of the first sequence group, and wherein pretreatment comprises treating the genomic DNA with an agent, or series of agents, that modifies unmethylated, but leaves methylated, cytosine essentially unmodified.

19. The set of oligomers of claim 18, wherein the set is suitable for use in generating nucleic acid amplificates.

20. A method for at least one of identifying liver cells, organ or tissue, distinguishing liver cells, organ or tissue from one or more other cell or tissue types, or identifying liver cells, organ or tissue as the source of a DNA sample, comprising:
a) obtaining at least one cell, tissue, bodily fluid or other sample, wherein the sample comprises genomic DNA;
b) determining, for the at least one sample and using a suitable assay, a methylation state or a level of methylation for at least one methylation variable position within a genomic DNA sequence selected from the group consisting of SEQ ID NO:205, a fragment thereof at least 16 contiguous nucleotides in length, and sequences that are complementary to, or hybridize under moderately stringent or stringent conditions to SEQ ID NO:205 or to a fragment thereof at least 16 contiguous nucleotides in length; and
c) comparing said at least one methylation state or level of methylation with a suitable standard or control, or comparing said at least one methylation state or level of methylation between or among corresponding methylation variable positions of the samples, whereby at least one of identifying liver cells, organ or tissue, distinguishing liver cells, organ or tissue from one or more other cell, organ or tissue types, or identifying liver cells, organ or tissue as the source of a DNA sample is, at least in part afforded.

21. The method of claim 20, wherein determining in b), comprises at least one of: use of one or more nucleic acid or oligomers comprising, in each case, at least one contiguous base sequence having a length of at least 16 nucleotides that is complementary to, or hybridizes under moderately stringent or stringent conditions to a pretreated genomic DNA sequence selected from a group consisting of SEQ ID NOS:1, 2, 69, 70; SEQ ID NOS:7, 8, 75, 76; SEQ ID NOS:9, 10, 77, 78; SEQ ID NOS:11, 12, 79, 80; SEQ ID NOS:13, 14, 81, 82; SEQ ID NOS:25, 26, 93, 94; SEQ ID NOS:27, 28, 95, 96; SEQ ID NOS:35, 36, 103, 104; SEQ ID NOS:37, 38, 105, 106; SEQ ID NOS:51, 52, 119, 120; SEQ ID NOS:53, 54, 121, 122; SEQ ID NOS:59, 60, 127, 128; and sequences complementary thereto; or use of a methylation-sensitive restriction enzyme on a genomic DNA sequence selected from the group consisting of SEQ ID NO:205 or a fragment thereof at least 16 contiguous nucleotides in length, and sequences that are complementary to, or hybridize under moderately stringent or stringent conditions to SEQ ID NO: 205 or a fragment thereof at least 16 contiguous nucleotides in length.

22. A method for at least one of identifying brain cells, organ or tissue, distinguishing brain cells, organ or tissue from one or more other cell or tissue types, or identifying brain cells, organ or tissue as the source of a DNA sample, comprising:
a) obtaining at least one cell, tissue, bodily fluid or other sample, wherein the sample comprises genomic DNA;
b) determining, for the at least one sample and using a suitable assay, a methylation state or a level of methylation for at least one methylation variable position within a genomic DNA sequence selected from the group consisting of SEQ ID NO:205, a fragment thereof at least 16 contiguous nucleotides in length, and sequences that are complementary to, or hybridize under moderately stringent or stringent conditions to SEQ ID NO:205 or to a fragment thereof at least 16 contiguous nucleotides in length; and
c) comparing said at least one methylation state or level of methylation with a suitable standard or control, or comparing said at least one methylation state or level of methylation between or among corresponding methylation variable positions of the samples, whereby at least one of identifying brain cells, organ or tissue, distinguishing brain cells, organ or tissue from one or more other cell, organ or tissue types, or identifying brain cells, organ or tissue as the source of a DNA sample is, at least in part afforded.

23. The method of claim 22, wherein determining in b), comprises at least one of: use of one or more nucleic acid or oligomers comprising, in each case, at least one contiguous base sequence having a length of at least 16 nucleotides that is complementary to, or hybridizes under moderately stringent or stringent conditions to a pretreated genomic DNA sequence selected from a group consisting of SEQ ID NOS:3, 4, 71, 72; SEQ ID NOS:17, 18, 85, 86; SEQ ID NOS:19, 20, 87, 88; SEQ ID NOS:29, 30, 97, 98; SEQ ID NOS: 49, 50, 117, 118; SEQ ID NOS:57, 58, 125, 126; SEQ ID NOS:61, 62, 129, 130; SEQ ID NOS:67, 68, 135, 136; and sequences complementary thereto; or use of a methylation-sensitive restriction enzyme on a genomic DNA sequence selected from the group consisting of SEQ ID NO:205 or a fragment thereof at least 16 contiguous nucleotides in length, and sequences that are complementary to, or hybridize under moderately stringent or stringent conditions to SEQ ID NO:205 or a fragment thereof at least 16 contiguous nucleotides in length.

24. A method for at least one of identifying breast cells, organ or tissue, distinguishing breast cells, organ or tissue from one or more other cell or tissue types, or identifying breast cells, organ or tissue as the source of a DNA sample, comprising:
a) obtaining at least one cell, tissue, bodily fluid or other sample, wherein the sample comprises genomic DNA;
b) determining, for the at least one sample and using a suitable assay, a methylation state or a level of methylation for at least one methylation variable position within a genomic DNA sequence selected from the group consisting of SEQ ID NO:205, a fragment thereof at least 16 contiguous nucleotides in length, and sequences that are complementary to, or hybridize under moderately stringent or stringent conditions to SEQ ID NO:205 or to a fragment thereof at least 16 contiguous nucleotides in length; and
c) comparing said at least one methylation state or level of methylation with a suitable standard or control, or comparing said at least one methylation state or level of methylation between or among corresponding methylation variable positions of the samples, whereby at least one of identifying breast cells, organ or tissue, distinguishing breast cells, organ or tissue from one or more other cell, organ or tissue types, or identifying breast cells, organ or tissue as the source of a DNA sample is, at least in part afforded.

25. The method of claim 24, wherein determining in b), comprises at least one of: use of one or more nucleic acid or oligomers comprising, in each case, at least one contiguous base sequence having a length of at least 16 nucleotides that is complementary to, or hybridizes under moderately stringent or stringent conditions to a pretreated genomic DNA sequence selected from a group consisting of SEQ ID NOS:3, 4, 71, 72; SEQ ID NOS:5, 6, 73, 74; SEQ ID NOS;15, 16, 83, 84; SEQ ID NOS:19, 20, 87, 88; SEQ ID NOS:21, 22, 89, 90; SEQ ID NOS:23, 24, 91, 92; SEQ ID NOS:29, 30, 97, 98; SEQ ID NOS:39, 40, 107, 108; SEQ ID NOS;41, 42, 109, 110; SEQ ID NOS;45, 46, 113, 114; SEQ ID NOS;63, 64, 131, 132; SEQ ID NOS:65, 66, 133, 134; SEQ ID NOS:67, 68, 135, 136; and sequences complementary thereto; or use of a methylation-sensitive restriction enzyme on a genomic DNA sequence selected from the group consisting of SEQ ID NO:205 or a fragment thereof at least 16 contiguous nucleotides in length, and sequences that are complementary to, or hybridize under moderately stringent or stringent conditions to SEQ ID NO:205 or a fragment thereof at least 16 contiguous nucleotides in length.

26. A method for at least one of identifying muscle cells, organ or tissue, distinguishing muscle cells, organ or tissue from one or more other cell or tissue types, or identifying muscle cells, organ or tissue as the source of a DNA sample, comprising:
a) obtaining at least one cell, tissue, bodily fluid or other sample, wherein the sample comprises genomic DNA;
b) determining, for the at least one sample and using a suitable assay, a methylation state or a level of methylation for at least one methylation variable position within a genomic DNA sequence selected from the group consisting of SEQ ID NO:205, a fragment thereof at least 16 contiguous nucleotides in length, and sequences that are complementary to, or hybridize under moderately stringent or stringent conditions to SEQ ID NO:205 or to a fragment thereof at least 16 contiguous nucleotides in length; and
c) comparing said at least one methylation state or level of methylation with a suitable standard or control, or comparing said at least one methylation state or level of methylation between or among corresponding methylation variable positions of the samples, whereby at least one of identifying muscle cells, organ or tissue, distinguishing muscle cells, organ or tissue from one or more other cell, organ or tissue types, or identifying muscle cells, organ or tissue as the source of a DNA sample is, at least in part afforded.

27. The method of claim 26, wherein determining in b), comprises at least one of: use of one or more nucleic acid or oligomers comprising, in each case, at least one contiguous base sequence having a length of at least 16 nucleotides that is complementary to, or hybridizes under moderately stringent or stringent conditions to a pretreated genomic DNA sequence selected from a group consisting of SEQ ID NOS:15, 16, 83, 84; SEQ ID NOS:19, 20, 87, 88; SEQ ID NOS:21, 22, 89, 90; SEQ ID NOS:27, 28, 95, 96; SEQ ID NOS:29, 30, 97, 98; SEQ ID NOS:43, 44, 111, 112; SEQ ID NOS:45, 46, 113, 114; SEQ ID NOS:47, 48, 115, 116; SEQ ID NOS:55, 56, 123, 124; SEQ ID NOS:57, 58, 125, 126; SEQ ID NOS:63, 64, 131, 132; and sequences complementary thereto; or use of a methylation-sensitive restriction enzyme on a genomic DNA sequence selected from the group consisting of SEQ ID NO:205 or a fragment thereof at least 16 contiguous nucleotides in length, and sequences that are complementary to, or hybridize under moderately stringent or stringent conditions to SEQ ID NO:205 or a fragment thereof at least 16 contiguous nucleotides in length.

28. A method for at least one of identifying lung cells, organ or tissue, distinguishing lung cells, organ or tissue from one or more other cell, organ or tissue types, or identifying lung cells, organ or tissue as the source of a DNA sample, comprising:
a) obtaining at least one cell, tissue, bodily fluid or other sample, wherein the sample comprises genomic DNA;
b) determining, for the at least one sample and using a suitable assay, a methylation state or a level of methylation for at least one methylation variable position within a genomic DNA sequence selected from the group consisting of SEQ ID NO:205, a fragment thereof at least 16 contiguous nucleotides in length, and sequences that are complementary to, or hybridize under moderately stringent or stringent conditions to SEQ ID NO:205 or to a fragment thereof at least 16 contiguous nucleotides in length; and
c) comparing said at least one methylation state or level of methylation with a suitable standard or control, or comparing said at least one methylation state or level of methylation between or among corresponding methylation variable positions of the samples, whereby at least one of identifying lung cells, organ or tissue, distinguishing lung cells, organ or tissue from one or more other cell, organ or tissue types, or identifying lung cells, organ or tissue as the source of a DNA sample is, at least in part afforded.

29. The method of claim 28, wherein determining in b), comprises at least one of: use of one or more nucleic acid or oligomers comprising, in each case, at least one contiguous base sequence having a length of at least 16 nucleotides that is complementary to, or hybridizes under moderately stringent or stringent conditions to a pretreated genomic DNA sequence selected from a group consisting of SEQ ID NOS:21, 22, 89, 99; SEQ ID NOS:29, 30, 97, 98; SEQ ID NOS:31, 32, 99, 100; SEQ ID NOS:33, 34, 101, 102; SEQ ID NOS:55, 56, 123, 124, and sequences complementary thereto; or use of a methylation-sensitive restriction enzyme on a genomic DNA sequence selected from the group consisting of SEQ ID NO:205 or a fragment thereof at least 16 contiguous nucleotides in length, and sequences that are complementary to, or hybridize under moderately stringent or stringent conditions to SEQ ID NO:205 or a fragment thereof at least 16 contiguous nucleotides in length.

30. Use of a nucleic acid or oligomer, in a method for the identification or distinguishing of liver cells, organ or tissue or a nucleic acid derived there from, or for the identification of liver cells, organ or tissue as the source of said nucleic acid, wherein said nucleic acid or oligomer comprises at least one contiguous base sequence having a length of at least 16 nucleotides that is complementary to, or hybridizes under moderately stringent or stringent conditions to a pretreated genomic DNA sequence selected from the group consisting of SEQ ID NOS:1, 2, 69, 70; SEQ ID NOS:7, 8, 75, 76; SEQ ID NOS:9, 10, 77, 78; SEQ ID NOS:11, 12, 79, 80; SEQ ID NOS:13, 14, 81, 82; SEQ ID NOS:25, 26, 93, 94; SEQ ID NOS:27, 28, 95, 96; SEQ ID NOS:35, 36, 103, 104; SEQ ID NOS:37, 38, 105, 106; SEQ ID NOS:51, 52, 119, 120; SEQ ID NOS:53, 54, 121, 122; SEQ ID NOS:59, 60, 127, 128; and sequences complementary thereto, said method comprising determining the level of methylation of at least one methylation variable positions (MVPs) within one or more sequences of the sequence group.

31. The use of a nucleic acid or oligomer, in a method for the identification or distinguishing of liver cells, organ or tissue, or a nucleic acid derived there from, or for the identification of liver cells, organ or tissue as the source of said nucleic acid, wherein said nucleic acid or oligomer comprises at least one contiguous base sequence at least 16 nucleotides in length selected from the group consisting of SEQ ID NOS:137, 138; 143, 144: 145, 146; 147, 148; 149, 150; 161, 162; 163, 164; 171, 172; 173, 174; 187, 188; 189, 190; 19, and SEQ ID NO:196.

32. Use of a nucleic acid or oligomer, in a method for the identification or distinguishing of brain cells, organ or tissue or a nucleic acid derived there from, or for the identification of brain cells, organ or tissue as the source of said nucleic acid, wherein said nucleic acid or oligomer comprises at least one contiguous base sequence having a length of at least 16 nucleotides that is complementary to, or hybridizes under moderately stringent or stringent conditions to a pretreated genomic DNA sequence selected from the group consisting of SEQ ID NOS:3, 4, 71, 72; SEQ ID NOS:17, 18, 85, 86; SEQ ID NOS:19, 20, 87, 88; SEQ ID NOS:29, 30, 97, 98; SEQ ID NOS:49, 50, 117, 118; SEQ ID NOS:57, 58, 125, 126; SEQ ID NOS:61, 62, 129, 130; SEQ ID NOS:67, 68, 135, 136; and sequences complementary thereto, said method comprising determining the level of methylation of at least one methylation variable positions (MVPs) within one or more sequences of the sequence group.

33. The use of a nucleic acid or oligomer, in a method for the identification or distinguishing of brain cells, organ or tissue, or a nucleic acid derived there from, or for the identification of brain cells, organ or tissue as the source of said nucleic acid, wherein said nucleic acid or oligomer comprises at least one contiguous base sequence at least 16 nucleotides in length selected from the group consisting of SEQ ID NOS:139, 140; 153, 154; 155, 156; 157, 158; 165, 166; 185, 186; 193, 194; 197, 198; 203 and SEQ ID NO:204.

34. Use of a nucleic acid or oligomer, in a method for the identification or distinguishing of breast cells, organ or tissue or a nucleic acid derived there from, or for the identification of breast cells, organ or tissue as the source of said nucleic acid, wherein said nucleic acid or oligomer comprises at least one contiguous base sequence having a length of at least 16 nucleotides that is complementary to, or hybridizes under moderately stringent or stringent conditions to a pretreated genomic DNA sequence selected from the group consisting of SEQ ID NOS:3, 4, 71, 72; SEQ ID NOS:5, 6, 73, 74; SEQ ID NOS:15, 16, 83, 84; SEQ ID NOS:19, 20, 87, 88; SEQ ID NOS:21, 22, 89, 90; SEQ ID NOS:23, 24, 91, 92; SEQ ID NOS:29, 30, 97, 98; SEQ ID NOS:39, 40, 107, 108; SEQ ID NOS:41, 42, 109, 110; SEQ ID NOS:45, 46, 113, 114; SEQ ID NOS:63, 64, 131, 132; SEQ ID NOS:65, 66, 133, 134; SEQ ID NOS:67, 68, 135, 136; and sequences complementary thereto, said method comprising determining the level of methylation of at least one methylation variable positions (MVPs) within one or more sequences of the sequence group.

35. The use of a nucleic acid or oligomer, in a method for the identification or distinguishing of breast cells, organ or tissue, or a nucleic acid derived there from, or for the identification of breast cells, organ or tissue as the source of said nucleic acid, wherein said nucleic acid or oligomer comprises at least one contiguous base sequence at least 16 nucleotides in length selected from the group consisting of SEQ ID NOS:139, 140; 141, 142; 151, 152; 155, 156, 157, 158; 159, 160; 165, 166, 175, 176; 177, 178; 181, 182; 199, 200; 201, 202; 203 and SEQ ID NO:204.

36. Use of a nucleic acid or oligomer, in a method for the identification or distinguishing of muscle cells, organ or tissue or a nucleic acid derived there from, or for the identification of muscle cells, organ or tissue as the source of said nucleic acid, wherein said nucleic acid or oligomer comprises at least one contiguous base sequence having a length of at least 16 nucleotides that is complementary to, or hybridizes under moderately stringent or stringent conditions to a pretreated genomic DNA sequence selected from the group consisting of SEQ ID NOS:15, 16, 83, 84; SEQ ID NOS:19, 20, 87, 88; SEQ ID NOS:21, 22, 89, 90; SEQ ID NOS:27, 28, 95, 96; SEQ ID NOS:29, 30, 97, 98; SEQ ID NOS:43, 44, 111, 112; SEQ ID NOS:45, 46, 113, 114; SEQ ID NOS:47, 48, 115, 116; SEQ ID NOS:55, 56, 123, 124; SEQ ID NOS:57, 58, 125, 126; SEQ ID NOS:63, 64, 131, 132; and sequences complementary thereto, said method comprising determining the level of methylation of at least one methylation variable positions (MVPs) within one or more sequences of the sequence group.

37. The use of a nucleic acid or oligomer, in a method for the identification or distinguishing of muscle cells, organ or tissue, or a nucleic acid derived there from, or for the identification of muscle cells, organ or tissue as the source of said nucleic acid, wherein said nucleic acid or oligomer comprises at least one contiguous base sequence at least 16 nucleotides in length selected from the group consisting of SEQ ID NOS:152, 152; 155, 156; 157, 158; 163, 164; 165, 166; 179, 180; 181, 182; 183, 184; 191, 192; 193, 194; 199 and SEQ ID NO:200.

38. Use of a nucleic acid or oligomer, in a method for the identification or distinguishing of lung cells, organ or tissue or a nucleic acid derived there from, or for the identification of lung cells, organ or tissue as the source of said nucleic acid, wherein said nucleic acid or oligomer comprises at least one contiguous base sequence having a length of at least 16 nucleotides that is complementary to, or hybridizes under moderately stringent or stringent conditions to a pretreated genomic DNA sequence selected from the group consisting of SEQ ID NOS:19, 20, 87, 88; SEQ ID NOS:21, 22, 89, 99; SEQ ID NOS:29, 30, 97, 98; SEQ ID NOS:31, 32, 99, 100; SEQ ID NOS:33, 34, 101, 102; SEQ ID NOS:55, 56, 123, 124; and sequences complementary thereto, said method comprising determining the level of methylation of at least one methylation variable positions (MVPs) within one or more sequences of the sequence group.

39. The use of a nucleic acid or oligomer, in a method for the identification or distinguishing of lung cells, organ or tissue, or a nucleic acid derived there from, or for the identification of lung cells, organ or tissue as the source of said nucleic acid, wherein said nucleic acid or oligomer comprises at least one contiguous base sequence at least 16 nucleotides in length selected from the group consisting of SEQ ID NOS:155, 156; 157, 158; 165, 166; 167, 168; 169, 170; 191 and SEQ ID NO:192.

40. Use of a nucleic acid or oligomer, in a method for distinguishing as the source of a nucleic acid sample, a first group of tissue or cells from a second group of tissues or cells, wherein said nucleic acid or oligomer comprises at least one contiguous base sequence having a length of at least 16 nucleotides that is complementary to, or hybridizes under moderately stringent or stringent conditions to a pretreated genomic DNA sequence selected from a first group consisting of SEQ ID NOS:19, 20, 87, 88 and sequences complementary thereto, or use in said method of a nucleic acid or oligomer comprising at least one contiguous base sequence having a length of at least 16 nucleotides selected from a second group of SEQ ID NOS:155 and 156, said method comprising determining the methylation state or level of methylation of at least one methylation variable positions (MVPs) within one or more sequences of the first sequence group; wherein the first group of tissues or cells comprises breast, brain and muscle cells or tissues, and the second group of tissues or cells comprises liver; lung and prostate cells or tissues.

41. Use of a nucleic acid or oligomer, in a method for distinguishing as the source of a nucleic acid sample, a first group of tissue or cells from a second group of tissues or cells, wherein said nucleic acid or oligomer comprises at least one contiguous base sequence having a length of at least 16 nucleotides that is complementary to, or hybridizes under moderately stringent or stringent conditions to a pretreated genomic DNA sequence selected from a first group consisting of SEQ ID NOS:21, 22, 89, 90 and sequences complementary thereto, or use in said method of a nucleic acid or oligomer comprising at least one contiguous base sequence having a length of at least 16 nucleotides selected from a second group of SEQ ID NOS:157 and 158, said method comprising determining the methylation state or level of methylation of at least one methylation variable position (MVPs) within one or more sequences of the first sequence group; wherein the first group of tissues or cells comprises breast, liver and muscle cells or tissues, and the second group of tissues or cells comprises lung and brain cells or tissues.

42. Use of a nucleic acid or oligomer, in a method for distinguishing as the source of a nucleic acid sample, a first group of tissue or cells from a second group of tissues or cells, wherein said nucleic acid or oligomer comprises at least one contiguous base sequence having a length of at least 16 nucleotides that is complementary to, or hybridizes under moderately stringent or stringent conditions to a pretreated genomic DNA sequence selected from a first group consisting of SEQ ID NOS:27, 28, 95, 96 and sequences complementary thereto, or use in said method of a nucleic acid or oligomer comprising at least one contiguous base sequence having a length of at least 16 nucleotides selected from a second group of SEQ ID NOS:163 and 164, said method comprising determining the methylation state or level of methylation of at least one methylation variable position (MVPs) within one or more sequences of the first sequence group; wherein the first group of tissues or cells comprises liver and muscle cells or tissues, and the second group of tissues or cells comprises breast and brain cells or tissues.

43. Use of a nucleic acid or oligomer, in a method for distinguishing as the source of a nucleic acid sample, a first group of tissue or cells from a second group of tissues or cells, wherein said nucleic acid or oligomer comprises at least one contiguous base sequence having a length of at least 16 nucleotides that is complementary to, or hybridizes under moderately stringent or stringent conditions to a pretreated genomic DNA sequence selected from a first group consisting of SEQ ID NOS:29, 30, 97, 98 and sequences complementary thereto, or use in said method of a nucleic acid or oligomer comprising at least one contiguous base sequence having a length of at least 16 nucleotides selected from a second group of SEQ ID NOS:165 and 166, said method comprising determining the methylation state or level of methylation of at least one methylation variable position (MVPs) within one or more sequences of the first sequence group; wherein the first group of tissues or cells comprises breast, brain and muscle cells or tissues, and the second group of tissues or cells comprises lung and prostate cells or tissues.

44. Use of a nucleic acid or oligomer, in a method for distinguishing as the source of a nucleic acid sample, a first group of tissue or cells from a second group of tissues or cells, wherein said nucleic acid or oligomer comprises at least one contiguous base sequence having a length of at least 16 nucleotides that is complementary to, or hybridizes under moderately stringent or stringent conditions to a pretreated genomic DNA sequence selected from a first group consisting of SEQ ID NOS:39, 40, 107, 108 and sequences complementary thereto, or use in said method of a nucleic acid or oligomer comprising at least one contiguous base sequence having a length of at least 16 nucleotides selected from a second group of SEQ ID NOS:175 and 176, said method comprising determining the methylation state or level of methylation of at least one methylation variable position (MVPs) within one or more sequences of the first sequence group; wherein the first group of tissues or cells comprises breast, and prostate cells or tissues, and the second group of tissues or cells comprises brain, lung and liver cells or tissues.

45. Use of a nucleic acid or oligomer, in a method for distinguishing as the source of a nucleic acid sample, a first group of tissue or cells from a second group of tissues or cells, wherein said nucleic acid or oligomer comprises at least one contiguous base sequence having a length of at least 16 nucleotides that is complementary to, or hybridizes under moderately stringent or stringent conditions to a pretreated genomic DNA sequence selected from a first group consisting of SEQ ID NOS:45, 46, 113, 114; 63, 64, 131, 132 and sequences complementary thereto, or use in said method of a nucleic acid or oligomer comprising at least one contiguous base sequence having a length of at least 16 nucleotides selected from a second group of SEQ ID NOS:181, 182, 199 and 200, said method comprising determining the methylation state or level of methylation of at least one methylation variable position (MVPs) within one or more sequences of the first sequence group; wherein the first group of tissues or cells comprises breast and muscle cells or tissues, and the second group of tissues or cells comprises lung, brain, liver and prostate cells or tissues.

46. Use of a nucleic acid or oligomer, in a method for distinguishing as the source of a nucleic acid sample, a first group of tissue or cells from a second group of tissues or cells, wherein said nucleic acid or oligomer comprises at least one contiguous base sequence having a length of at least 16 nucleotides that is complementary to, or hybridizes under moderately stringent or stringent conditions to a pretreated genomic DNA sequence selected from a first group consisting of SEQ ID NOS:67, 68, 135, 136 and sequences complementary thereto, or use in said method of a nucleic acid or oligomer comprising at least one contiguous base sequence having a length of at least 16 nucleotides selected from a second group of SEQ ID NOS:203 and 204, said method comprising determining the methylation state or level of methylation of at least one methylation variable position (MVPs) within one or more sequences of the first sequence group; wherein the first group of tissues or cells comprises breast and brain cells or tissues, and the second group of tissues or cells comprises lung, muscle, liver and prostate cells or tissues.

47. Use of a nucleic acid or oligomer, in a method for distinguishing as the source of a nucleic acid sample, a first group of tissue or cells from a second group of tissues or cells, wherein said nucleic acid or oligomer comprises at least one contiguous base sequence having a length of at least 16 nucleotides that is complementary to, or hybridizes under moderately stringent or stringent conditions to a pretreated genomic DNA sequence selected from a first group consisting of SEQ ID NOS:57, 58, 125, 126 and sequences complementary thereto, or use in said method of a nucleic acid or oligomer comprising at least one contiguous base sequence having a length of at least 16 nucleotides selected from a second group of SEQ ID NOS:193 and 194, said method comprising determining the methylation state or level of methylation of at least one methylation variable position (MVPs) within one or more sequences of the first sequence group; wherein the first group of tissues or cells comprises brain and muscle cells or tissues, and the second group of tissues or cells comprises lung, breast, liver and prostate cells or tissues.

48. Use of a nucleic acid or oligomer, in a method for distinguishing as the source of a nucleic acid sample, a first group of tissue or cells from a second group of tissues or cells, wherein said nucleic acid or oligomer comprises at least one contiguous base sequence having a length of at least 16 nucleotides that is complementary to, or hybridizes under moderately stringent or stringent conditions to a pretreated genomic DNA sequence selected from a first group consisting of SEQ ID NOS:17, 18, 85, 86 and sequences complementary thereto, or use in said method of a nucleic acid or oligomer comprising at least one contiguous base sequence having a length of at least 16 nucleotides selected from a second group of SEQ ID NOS:153 and 154, said method comprising determining the methylation state or level of methylation of at least one methylation variable position (MVPs) within one or more sequences of the first sequence group; wherein the first group of tissues or cells comprises breast and lung cells or tissues, and the second group of tissues or cells comprises brain, muscle, liver and prostate cells or tissues.

49. A method for diagnosing a condition or disease characterized by specific methylation levels or methylation states of one or more methylation variable genomic DNA positions in a disease-associated cell or tissue or in a sample derived from a bodily fluid, comprising:
a) obtaining a test cell, tissue sample or bodily fluid sample comprising genomic DNA having one or more methylation variable positions in one or more regions thereof;
b) determining the methylation state or quantified methylation level at the one or more methylation variable positions; and
c) comparing said methylation state or level to that of a genome wide methylation map according to claim 1, said map comprising methylation level values for at least one of corresponding normal, or diseased cells or tissue, whereby a diagnosis of a condition or disease is, at least in part afforded.

50. A method for detecting the absence or presence of a medical condition in an organ, cell type or tissue, comprising:
a) retrieving a bodily fluid sample;
b) determining at least one of the amount or presence, of free-floating DNA that exhibits a tissue-, organ- or cell type-specific DNA methylation pattern by use of a nucleic acid or oligomer comprising at least one contiguous base sequence having a length of at least 16 nucleotides that is complementary to, or hybridizes under moderately stringent or stringent conditions to a pretreated genomic DNA sequence selected from the group consisting of SEQ ID NOS:1 through SEQ ID NO:204 and SEQ ID NOS:206 through SEQ ID NO:221, and sequences complementary thereto;
c) determining whether there is an abnormal level of free floating DNA that originates from said tissue, cell type or organ, thereby concluding, whether a medical condition associated with said tissue, cell type or organ is absent or present.

51. A method for diagnosing a condition or disease of an individual characterized by the presence of organ- or tissue-specific free-floating DNA in said individual's bodily fluid, comprising:
a) retrieving a bodily fluid sample;
b) determining at least one of the amount or presence, of free floating DNA that exhibits a tissue-, organ- or cell type-characteristic DNA methylation pattern with the use of at least one nucleic acid or oligomer comprising at least one contiguous base sequence having a length of at least 16 nucleotides that is complementary to, or hybridizes under moderately stringent or stringent conditions to a pretreated genomic DNA sequence selected from the group consisting of SEQ ID NOS:1 through SEQ ID NO:204 and SEQ ID NOS:206 through SEQ ID NO:221, and sequences complementary thereto; and
c) further determining, whether there is an abnormal level of free-floating DNA that originates from said tissue, cell type or organ, and, at least in part thereby, concluding whether a medical condition associated with said tissue, cell type or organ is absent or present.

52. A method for diagnosing a condition or disease of an individual characterized by the presence of organ- or tissue-specific free-floating DNA in said individual's bodily fluid, comprising:
a) retrieving a bodily fluid sample;
b) determining the methylation states or methylation levels of MVPs within at least one nucleic acid or oligomer comprising at least one contiguous base sequence having a length of at least 16 nucleotides that is complementary to, or hybridizes under moderately stringent or stringent conditions to a pretreated genomic DNA sequence selected from the group consisting of SEQ ID NOS:1 through SEQ ID NO:204 and SEQ ID NOS:206 through SEQ ID NO:221 and sequences complementary thereto;
c) comparing said methylation states or levels to that of a genome-wide methylation map according to claim 1, said map comprising methylation level values of the corresponding nucleic acids for a plurality of normal organs, cells or tissues; and
d) determining whether the methylation states or levels of b) match with known values and whether a specific organ or tissue is dominant, whereby a diagnosis of a condition or disease is, at least in part, afforded.

53. A method according to claims 49-52 wherein said free-floating DNA is derived from a tissue or organ selected from the group consisting of lung, liver, muscle, breast, brain or prostate.

54. A method for at least one of choosing or monitoring a course of treatment, comprising, obtaining a diagnosis according to claims 49 to 52, whereby at least one of choosing or monitoring a course of treatment is, at least in part, afforded.

55. Use of a method according to any one of claims 49-53 for diagnosing a disease of an individual, diagnosing a condition of an individual, prognosing a disease of an individual, monitoring disease progression, monitoring treatment response, monitoring the occurrence of treatment side affects, or for classification, differentiation, grading, staging, or diagnosing of a cell proliferative disease or for a combination thereof.

56. A method for at least one of, identifying one organ, cell or tissue type, or distinguishing one organ, cell or tissue type from another as the source of a nucleic acid sample, comprising:
a) obtaining a nucleic acid sample having genomic DNA;
b) pretreating the genomic DNA, or a fragment thereof, with one or more agents to convert 5-position unmethylated cytosine bases to uracil or to another base that is detectably dissimilar to cytosine in terms of hybridization properties;
c) contacting the pretreated genomic DNA, or the pretreated fragment thereof, with an amplification enzyme and at least one primer set, each said set comprising first and second primer each having a contiguous sequence at least 16 nucleotides in length that is complementary to, or hybridizes under moderately stringent or stringent conditions to a sequence selected from, in the case of the first primer, a first group consisting of SEQ ID NOS:1-136, and selected from, in the case of the second primer, a second group consisting of sequences complementary to the sequences of the first group, wherein the pretreated DNA, or the fragment thereof is either amplified to produce one or more amplificates, or is not amplified; and
d) determining, based on the presence or absence of, or on a property of said amplificate, the methylation state or level of methylation of at least one MVP within the pretreated version of SEQ ID NO:205 or within a contiguous region thereof, or an average, or a value reflecting an average methylation state of a plurality of MVPs within the pretreated version of SEQ ID NO:205 or within a contiguous region thereof, whereby at least one of identifying one organ, cell or tissue type, or distinguishing one organ, cell or tissue type from another as the source of the nucleic acid sample is, at least in part afforded.

57. The method of claim 56, wherein in step b) treating the genomic DNA, or the fragment thereof, comprises use of a solution selected from the group consisting of bisulfite, hydrogen sulfite, disulfite, and combinations thereof.

58. The method according to any one of claims 56 or 57, wherein at least one of contacting in c), or determining in d) comprises use of a method selected from the group consisting of MSP, MethyLight™, HeavyMethyl™, MS-SNuPE™, and combination thereof.

59. The method according to any one of claims 56 or 57, wherein at least one of said primers comprises a sequence selected from the group consisting of SEQ ID NO:137 through SEQ ID NO:204.

60. The method according to any of claims 56 through 58, wherein the contiguous sequence of one or more of said primers comprises at least one 5′-CG-3′, 5′-tG-3′ or 5′-Ca-3′ dinucleotide.

61. The method according to any one of claims 55 through 59, further comprising in step c) the use of at least one oligomer comprising a contiguous sequence at least 16 nucleotides in length having one or more 5′-CG-3′, 5′-tG-3′ or 5′-Ca-3′ dinucleotides that were CG dinucleotides prior to pretreating in b) of claim 54, and wherein the contiguous sequence of said oligomer is complementary or identical to a sequence selected from the group consisting of SEQ ID NOS:1-136, and complements thereof, and wherein said oligomer suppresses amplification of the nucleic acid to which it is hybridized.

62. The method according to any one of claims 56 through 61, wherein determining the methylation state, or level of methylation or the average methylation state or average level of methylation comprises use of at least one reporter or probe oligomer that hybridizes to one or more 5′-CG-3′, 5′-TG-3′ or 5′-CA-3′ dinucleotides, at positions which were 5′-CG-3′ dinucleotides prior to pretreating, whereby amplification of one or more target sequences is, at least in part, afforded.

63. The use of a method according to any one of claims 56 through 62 for the analysis, characterization, classification, differentiation, grading, staging, diagnosis, or prognosis of cell proliferative disorders, or the predisposition to cell proliferative disorders, or combination thereof.

64. The use of a method according to any one of claims 56 through 62 for the the analysis, characterisation, classification, differentiation, grading, staging, or diagnosis or a combination thereof of prostate cancer, breast cancer, lung cancer, liver cancer or brain cancer, or the predisposition to said types of cancer.

65. A kit useful for identifying one tissue, organ or cell type as the source of a nucleic acid, or for distinguishing one tissue, organ or cell type from another among a group of tissue organ or cell types, as the source of a nucleic acid comprising:
a) a bisulfite reagent or a methylation-sensitive deamination enzyme; and
b) at least one oligomer comprising, in each case a contiguous sequence of at least 9 nucleotides in length that is complementary to, or hybridizes under moderately stringent or stringent conditions to a sequence selected from the group consisting of SEQ ID NOS:1-136, and complements thereof.

66. The kit of claim 65, wherein the tissue type group comprises at least two tissue types selected from the group consisting of prostate, breast, lung, liver, muscle and brain.

67. A kit useful for detecting, diagnosing, prognosing or differentiating cell proliferative disorders of the prostate, breast, lung, liver, muscle or brain, or for distinguishing between cell proliferative disorders of the prostate, breast, lung, liver, muscle or brain, comprising:
a) a bisulfite reagent or a methylation sensitive deamination enzyme; and
b) at least one nucleic acid molecule or peptide nucleic acid molecule comprising, in each case a contiguous sequence at least 9 nucleotides in length that is complementary to, or hybridizes under moderately stringent or stringent conditions to a sequence selected from the group consisting of SEQ ID NOS:1-136, and complements thereof.

68. The kit of any one of claims 65 through 67, further comprising standard reagents for performing a methylation assay selected from the group consisting of MS-SNuPE™, MSP, MethylLight™, HeavyMethyl™, COBRA™, nucleic acid sequencing, and combinations thereof.

69. A method of providing diagnostic information relating to cancer, comprising:
a) determining the relative amount of free-floating DNA derived from a specific organ or tissue within the total amount of free-floating DNA in a bodily fluid sample of a patient suspected of suffering from a cell proliferative disorder, wherein said determining comprises determination of the level of methylation of at least three MVPs or CpGs selected from the group identified in Tables 37-70 in said bodily fluid sample, and wherein a methylation pattern is provided;
b) comparing said methylation pattern with methylation patterns found in a plurality of samples that have been identified to be characteristic for specific organs or tissues out of a group of other organs or tissues;
c) determining, in relation to samples from healthy donors, whether the methylation pattern determined in a) indicates an increased relative amount of free-floating DNA derived from a specific organ or tissue within the total amount of free-floating DNA in said bodily fluid, whereby a conclusion as to whether said patient has an increased risk of developing cancer is, at least in part, afforded.

70. The method of claim 67, wherein the methylation pattern in a) comprises the levels of methylation of at least 5 CpG positions.

71. The method of claim 67, wherein at least three MVPs or CpG positions of which the level of methylation is determined, are located within a 500 bp genomic region.

The application's sequence listing, which the Patent Office published only in electronic form, follows.

SEQUENCE LISTING (221 sequences)

SEQ ID NO: 1 - DNA, 2500 bp, Artificial Sequence
  chemically treated genomic DNA (Homo sapiens)
tgggtttttaggtagttttggaagttaagagaatatttagaaatggggagggagaagtagtggaaatttatatgggttgaggagtaggtaagatgttgtttttgcgggattgggaatgcgttgttttttagtgatatggttttcgagattaggagggatatatttaaggtagttttttttttttgatgatttttatttgttttttttttttaaagtaatttattgtttaagattatacgatttcgagaacggggaatattggtttcggtttttttattataatgtgagtgatgagatttttttttattgttatgacggttatatttttcggggttttgttaatcgtatttgttaagtgaatggtcggtggagtgggtagatagcgatttgtgataacggaggtgagaagtattttttttttttatattgttgtttttttgacggcgtttagttcgaggagtgggtattcggtttcggatattgtaatttttgttttttattttgtttacggggttttaggttttagtgtttatttcgatgttttatatttttgtagcggggtattgttttaattcgggtatttttattggtataaggaaggtgggtagttagtatcgttttgaagatagcgttatttattattgtagtcgggggtttattttgcgtggtttttagcggcgaacgtgttaggaaggtggtttttggagcgggacggagtttttttgttaaggtgatttttgatttgtatttttaggttagattttggttttttattttattgttttttttttttattttaattttgttttttttttattttgtttaaatttttttgtataattattttatttttgagttttttatattttggaaatttatgatttttcgtttttttggttattgtatttttgatatttttagatatttgattttatttttgatttttttagatttttttatgtacgatattttttaagaggtggtcgaagtttttttgttttttttgatagagattatagaaggagtcgatgttgaggatgggtacggtttaggtttgaagatagagaagggaggtagggtagggaattgggggaaaatggagaagggatagaattgttaatgttggagtttgagttatttttttggtatttaggggaataatagaagcggaagatcgttttggattttttaggttttatgaatatttatttggtgttagatggattagatagtattggggttagtaattttataggagttaaaaagtgtttagttaatttaattgagaaggtggaatttttttatttttgaattcgggggaatggaatttcgttgattttttaggattagttttttgattattttagtttttttgaataatagggttttaggaaaatttttaggttttattttgtttttttttttttttatttgaagtagttttttgattggtaatttttttatgaattttagtttttgagttttttattgagggtttttttgttttagtaaagtcgttgaaattttttaattatagtattttatttttaatgttatggcgttttgttttttttatttataggtggtaagttatggtgtgaagttaagatatggtttagtgatatatgttatatattttaaaatttgggttaaagtgtttgaagtagatagtagtaatgtagattgggttacgaagtagtttaatgaaattaattatgaaggttagaggttagggaatggtgggaggtttattttggggttaggaggtttagggtggagggggttatgagattattttgagggcgatagggaggattattttgtagttaaaggttgaatagtaggatcgttgggtaatggaggttagtgggaatttgttgggggttggaagggttattttgtggttaaagggaagttcgtgtaatgatgattaatttaaaaagttgaaagatgtgggattttagttgtagattggtttttggggttaaaagatggtttggaagattaggtgaggtgatggttttttttttttttatagattataagttgaagttagggattaatattaagaaggttttttaggtagtgtatagtatgatgagttggttagatgacgttttttttgaaggttggaatcgtattcgttatgttattatttttatgattgatggttagaagggattttttttttgttttagtttttttatttttttagattagtatgtggtttttaagtttatttgtaatattatatttatggttggggttttgaatgtgatttatagttggttgtttattttttttgtgattttttataaggaattttttttaagttttgtgattaattatttttaatttttttttaatttgtttattttgttacgtgtatttttgtttttagttagtttattttttttattttttatttttatggttttgttttttttgtaggattgtataatatgggcggggatttaattattgttattgatgagattcg

SEQ ID NO: 2 - DNA, 2500 bp, Artificial Sequence
  chemically treated genomic DNA (Homo sapiens)
cggattttattaatgatagtaattgggttttcgtttatgttgtgtaattttgtagaagagataggattatgagggtaggagataaggaagataaattggttaaaggtagggatatacgtggtagggtgagtaagttgaggaagggttagagatagttgattatagggtttaggaagaattttttatgaagggttataggagagatgaatagttagttatgagttatatttagggttttaattatgggtatagtgttataagtggatttaagggttatatgttggtttgagaaggtggggaggttgggataggagagaggttttttttgattattagttatgaggatgatgatatggcgggtgcggttttagtttttaggagggacgttatttggttagtttattatgttgtatattgtttggagggtttttttggtgttagtttttgattttaatttgtggtttgtggagagggaagagattattattttatttggttttttaagttattttttaattttagagattaatttgtaattgaaattttatattttttaattttttaagttaattattattatacggatttttttttgattataaagtggtttttttagtttttaataggtttttattaatttttattgtttaacgattttgttgtttaatttttgattataaagtggttttttttgtcgtttttaaggtagttttatgattttttttattttgaattttttgattttaaagtgaattttttattattttttaatttttgatttttataattgattttattgagttgtttcgtgatttagtttgtattattgttgtttgttttagatattttgatttaaattttggggtatgtggtatatgttattagattatattttggttttatattataatttgttatttgtgggtgaggagaataaggcgttatggtattgaaaatagaatattgtgattgggagattttagcgattttgttgggatagggaggtttttagtaagaggtttaagggttgaggtttatggaggaattattagttaagaaattgttttaagtaaaagggaaggaggatagaataggatttggagatttttttggggttttgttgtttagaggggttggaatgattagggagttagttttggaagattagcgagattttattttttcgagtttagggataggaggattttatttttttaattaagttgattagatattttttggtttttgtgaagttgttggttttaatgttgtttgatttatttagtattaggtagatgtttatggagtttgaagggtttaggacgatttttcgtttttgttgtttttttgggtgttaggagagtggtttaggttttagtattaatagttttgttttttttttatttttttttagttttttgttttgttttttttttttgtttttaaatttgggtcgtgtttatttttagtatcgattttttttatggtttttgttagggaagataggaaagtttcggttattttttgaggggtgtcgtatatgaaggagtttgggagagttagaaatgaggttaaatgtttgggagtgttagggatatagtgattaaagagacgggggattatgggtttttagggtataaaaggtttagaagtgagatagttgtatagggaggtttaaataaagtgaggaaagagtagggttgaggtggggagagaagatagtaggatggaagattaggatttgatttgggggtataggttaaaggttattttggtaggaaggtttcgtttcgttttaagagttatttttttgatacgttcgtcgttgggagttacgtagggtaagttttcggttgtagtggtaggtgacgttgtttttaaggcggtattggttgtttattttttttgtgttaatggggatgttcgggttggagtagtatttcgttgtagaggtatgagatatcgaggtaagtattgaagtttgaggtttcgtgagtaaggtagagagtaagagttatagtgttcggagtcgagtgtttatttttcgggttgggcgtcgttagggagatagtaatgtagggggaggggatgttttttattttcgttgttatagatcgttgtttgtttattttatcggttatttatttggtaggtgcgattggtagagtttcggagagtgtaatcgttatagtagtggaaagagattttattatttatattgtagtagggagatcggggttagtatttttcgttttcgaagtcgtgtggttttggatagtggattgttttgagaaggggggataagtagaagttattaagagggaaaggttgttttaggtgtattttttttggtttcggagattatgttattgagaaatagcgtatttttagtttcgtagaagtagtattttatttattttttaatttatatggatttttattgtttttttttttttatttttgagtgtttttttgatttttagggttgtttggaagttta

SEQ ID NO: 3 - DNA, 2500 bp, Artificial Sequence
  chemically treated genomic DNA (Homo sapiens)
tggaggtgagggttttaggttggggatgttgggatttttttgtgatagtttttagaatgttttttttttttttttaggtttggttgttttttttttttgacgcgggttatttttttttttaagttttataaatttgttaggtgtttttgggtttgtttattttttttttgttgttattgagatggagttttgttttgttttttaggttggagtgtagtggtacgattttagtttattgtaatttttgttttttgggtttaagcgatttttttattttagtttttcgagtagttgagattataggtgtttattattatattagttaatttttgtatttttagtagagacgggatttcgttatgttggttaggatggttttgaatttttgattttaagtgatttgtttgttttaattttttaaagtgttgagattataggcgtgagttattgtatttattcgggtttgtttattttatttttttttttggttttatttttgttgtagtggataagttgtgtcgaggttgttttttaagaaaaaattatgttttttaatttgatagatgttagggaggtggtgatagattagtttttatgtagtgggatttaggaggatgagagtttttgtaagggtgagttttttattatgtttggatttttaaggggaaggttatttgtgtttttgtggttagtatgtatgttagaatattagtttattgttttagatgatattgttttttgttattttttgttggtaggagaatttgggggagtagttttttttgagcggagatttaggtttttttaggtgagaaggtagaagtttgtaggatttaggggttataggattttagttttgttggggggatgagggaggtttttgagggatttagggaggttggggtttatagttggggttgtggtagttttttagttagttttttttttttttttaggtgggtttggtgagttggggtttttataatttttgttttggttttgttgataaaaattttcgtaaaagggtttttcgtagtaaggtttcgtcgttacgagatttttatattaatttttttcgtatgtagttttggttgaggtagtatttgggggatgttttgaattttttatttttttagttatggttattgagttttttgttgttttgttagaatttgtcgtttttttattttttatttttgaatggttatttttagattttgtgatttatttttttttttagttgagtaaattcgggtttttaggatgttagaggtagcgtatataagttgggaaatttttagggtttttattagtaggattgtttcgttgttttatttttcgttttttggtttgtttttagattttttttttggttgatttgatttatgtttgttttatttttatatggaattttttagttatgaaattaataaaaattaatggtttttatattttttagtgtttttatttggaggttaggtagggttggttttgggggagggggaggttagaatgattttaagagttataggaaggtaggttagagattttattggataaatagtggttggattttgtattataatatataattaataggggagtgagttggatttttatttttggtttttaagtgggtggtttgggtttattggggaggagttaaggtcggagaggaggtattgaaggggagagttttggatttttggtagtaaagggtgggatttttgtagtttttgtttttttgattggtagtttagcggggttttttcgtttggatgtttcgggaaagtgatgtgggtaggataggcggggcgagtcgtaggtgttagaatatagattgtataaaaggttgggggttggtggggagtaggggaagggaatgtgattaggtttaggtttggagttttagtttggatattgagttaagtagataagtaaagtaagttaggatatattattttgttttaggtttagttttttttttgttttttaacgttatggggagtaattttagtttttaattttgtttgatgttttttattttgggttttttgtttggaggtaagcgagggtaattttttttttttgttgtttttagtatttttttttggttttttggggttaggttttattagtttttttttttaggtgtgattattattttatggtttttggtttagttttagggattttgttttttggagggggtagagattaaaggcggtttttttcgatttttttaagagggttaggtattggagtacgtgtgtttttttggtttttattcgtattttgtgtagatacgtatttgtagatttacggggttttggagtattttgaagatttaagattaaaagattgttaggaaggtagagtgtagaggtttgagggtaatgagtgtgggtagtggtttaaggtagaaatagggtaggcggtagtaaggttaggattaggatgagattaggtagggtgataaggtgggttgatcgggagtagg

SEQ ID NO: 4 - DNA, 2500 bp, Artificial Sequence
  chemically treated genomic DNA (Homo sapiens)
tttattttcggttagtttattttgttattttgtttagttttattttagttttgattttgttgtcgtttgttttgtttttgttttaggttattgtttatatttattgtttttaaatttttgtattttgtttttttgatagttttttggttttgagtttttagggtgttttaggatttcgtagatttgtaggtacgtgtttgtatagggtacgggtagaagttagaaggatatacgtattttagtgtttggtttttttggagaagtcggaaggagtcgtttttgatttttattttttttagagagtaggatttttggggttgggttaaagattatggagtggtggttatatttgaagagaaaggttgatgaagtttggttttaaaaggttaaggagggatgttggagatagtaggaagggaaggttattttcgtttatttttagataagaggtttaagataaagggtattaggtagagttgggggttgagattgttttttatggcgttggaaggtaggagagaagttgggtttggggtaggatggtgtgttttggtttgttttgtttgtttgtttggtttagtgtttaagttgaaattttagatttagatttggttatattttttttttttgttttttattagtttttagttttttatataatttgtgttttggtatttgcggttcgtttcgtttgttttatttatattattttttcggaatatttaagcgggagggtttcgttgagttgttagttaaggaaatagaaattgtagaagttttattttttgttgttaaaggtttaggatttttttttttagtatttttttttcggttttagtttttttttagtaagtttaaattatttatttagggattagaaataaggatttagtttatttttttgttgattgtgtgttatggtgtagagtttagttattgtttgtttagtggggtttttgatttgtttttttgtagtttttggagttattttggttttttttttttttaaggttagttttatttggtttttagatagaggtattgagagatgtggaaattattgatttttattaattttataattgggaaattttatgtgaaagtgaaataagtatgagttaagttaattagggaaggaatttggggataggttaaggagcgggaggtggggtagcgaggtagttttgttggtaggagttttgaggattttttagtttgtgtgcgttgtttttggtattttagagattcggatttatttagttaggagagaggatggattatagggtttaagggtggttatttagaggtagaagatggaggggcggtagattttggtagggtagtagagggtttagtggttatggttagaggggtaaaaaatttaggatattttttaggtgttgttttagttagggttgtatgcggaagagattgatgtgaaagtttcgtggcggcgggattttgttacgaggggtttttttgcgggagtttttgttagtagagttaaggtaggggttgtaaagattttagtttattagatttatttggagaaaaggagagaattggttgggaggttgttatagttttaattgtaagttttaatttttttagattttttaaaggttttttttatttttttaataaggttgagattttgtaatttttgggttttgtaagtttttatttttttatttgaaaaaatttgaattttcgtttaaggaaaattgtttttttagatttttttgttagtaaagggtgataggagatagtgttatttagggtagtggattggtgttttggtatgtatgttggttatagagatataggtggttttttttttgggaatttaggtatggtgagggatttatttttgtagggatttttatttttttgggttttattgtataggaattggtttgttattatttttttgatatttgttaagttggggaatatggtttttttttgggagataatttcggtatagtttgtttattgtagtaggggtggaattagagagaagggtagaataagtagattcgggtgggtgtagtggtttacgtttgtaattttagtattttgggaggttgaggtaggtagattatttgaggttaggagtttaagattattttggttaatatggcgaaatttcgtttttattaaaaatataaaaattagttggtgtggtggtgggtatttgtaattttagttattcgggaggttgaagtaggagaatcgtttgaatttaggaggtagaagttgtagtgagttgaggtcgtgttattgtattttagtttgggagatagagtaagattttattttaataataataaaaaaagaataagtagatttagggatatttagtaggtttgtgaggtttgggaggaggggtgattcgcgttagagagagaaagtagttagatttggagaaggaagagagatattttgggagttgttatagggggattttagtatttttaatttgagatttttattttta

SEQ ID NO: 5 - DNA, 2500 bp, Artificial Sequence
  chemically treated genomic DNA (Homo sapiens)
tttgagtggatatagtatatgttttagagagtatagggttgggggtaaggttatcgattaataggattttaaggtagaagaattttttttagtatagaataaaatgaaaagttttttaggtttatttttttttatatagatacggtaattattcgattttttaattttttttttattttttttttttttttattttataaaatcgttattgttattatggtttttttttaatgagttgttgggtatattttttagacggggtggtggtcgggtagaggggttttttattttttagtaggcgcggtcgggtagaggcgttttttatttttcggatagggcggttggtcgggcggggggttgatttttttatttttttttcggacggggcggttggttgggcggggggttgatttttttatttttttttcggacggggcggttggtcgggcggggggttgatttttttatttttttttcggatagagtggttggtcgggtaaagtggttttttattttttagtaggggcggtcgggtagaggcgttttttatttttcggacggggcggttggtcgggttgggggttgatttttttatttttttttcggacggggcggttggtcgggcggggggttgatttttttatttttttttcggattaggtggttgttgggcggaggggttttttattttttagatagggcggttgtcgggcggaggggttttttattttttagatggagcggttgttaggtagagggtttttttattttttagacggggcggtcgggtagcgacgttttttatatttcggacggggcggtcgggtagaggtgttttttatattttagacgatgggcggtagggtagagacgttttttatattttagacgatgggtggttaggcggagatattttttattttttagacggggtggcggtcgggtagaggttgtaatttcggtattttgggaggttaaggtaggttgttgggaggtggaggttgtagcgagtcgagattacgttattgtattttagtttgggtattattgagtattgagtgaacgagatttcgtttgtaattttagtatttcgggaggtcgaggttggtggattattcgcggttaggagttggagattagttcggttaatatagcgaaatttcgtttttattaataaaatacgaaaattagttaggcgtggcggcgcgcgtttgtaatcgtaggtattcggtaagttgaggtaggagaattaggtagggaggttgtagtgagtcgagatggtagtagtatcgtttagtttcggttcggtattagagggagatcgtggaaagagagggagagggagattatggggagagggtgagggagagggagttttaggaatatttttgtatgtgattttggtatatgtatgtatttgttttttttgagtaaatgatttaaatgtggaattgttatattataggttggtatatgtttagttgtagtagaggttgagaaagttttatttacgtatatgttagtaaggtaatagagtgttagtcgttttgtattttttttaatatttggaattatttgttgttttagtgttagtcgttttgatgggtgtgtagggatgttttattgtggtttatgaaatataaatgttttttgaaggagtggagggattattagttgattttttttttgggtttttgggggttttgggatagatatgggtgtatttttgggttggaattgggaagtttttgttggtaattgaggtcgttgaggaggtagagtttgatgggagggggttatttatttttgtttttttttgtttattcgtagttggttattgttttaatttaggtattttattgggcgtagtgcggataggttttcgttttggttatggggataaggttcgttatcgttgtttttcgaattttgtgtttacggggttttcggagcgggagtgttagggtaacggggtttggagtggaacggagtttatttgtcgtcgtgagtagttgttttgtttttttgagatttttcggtatattcggttattgtttcggttgatttttgtgtggttttttttatagaattttatttttatgatttttttgaggacgtggtttttgttttgggtattttttttttttatatgtttggggttattaattttatttagaagataaagggtgagtgtttgaggtggggtttttggttgagtagggtgttggatttgggtcggagtaagggaggatgtaatttttttggaggttaggagttttggtgggtttagttattgaaagggagggaggtagagaagttggatttgtttggcgagagcgtaggaaggaggtggggatttgaattttttttttttatatttttttagaaagtttgggtcgtaaaatttaaatttagcgttttggttatttgaatttttatttgtttttggattgttcgtagagtgtgtcggaaaatgatttttttatttttaaggagagcg

SEQ ID NO: 6 - DNA, 2500 bp, Artificial Sequence
  chemically treated genomic DNA (Homo sapiens)
cgttttttttgaagatgagaaagttatttttcgatatattttgcgaatagtttaggagtaggtagaggtttagatgattagagcgttggatttggattttacggtttaggttttttggagaaatgtggaaggggaggatttagatttttattttttttttgcgttttcgttaagtaggtttagtttttttgttttttttttttttagtggttgagtttattaaggtttttggtttttaggaaggttgtatttttttttgtttcggtttagatttagtattttgtttaattagaaattttattttaaatatttattttttgttttttgggtgggattggtggttttaagtatgtgggagaaggaagtgtttagggtaggggttacgtttttagggaagttataagagtagggttttgtggggagagttatataggagttagtcggggtagtggtcgggtgtgtcgaggaattttaggagggtagggtagttatttacggcggtagatgggtttcgttttattttagatttcgttgttttggtattttcgtttcgaagatttcgtgagtataagattcgaggagtagcgatagcggattttgtttttatgattaaagcggaagtttgttcgtattgcgtttagtgaaatgtttgggttggggtagtggttagttgcgagtgaataaaggaaggtagaggtgagtagtttttttttattaggttttgtttttttagcggttttagttgttagtagaagttttttagttttaatttagggatgtatttatgtttgttttagagtttttagagatttagggaagaagttagttgatggtttttttatttttttagagaatatttatattttataaattatagtgaggtatttttatatatttattaaaacggttaatattgaaataataggtaattttaagtgttggagaggatgtagagcgattggtattttgttattttgttggtatgtacgtgggtgaaatttttttagtttttattataattaaatatatgttagtttgtgatgtgataattttatatttagattatttatttaagagaagtaagtgtatatatgtattaaaattatatgtaagaatgtttttagagtttttttttttttattttttttttatggtttttttttttttttttttttacggtttttttttgatgtcgagtcgaagttggacggtattgttgttatttcggtttattgtaatttttttgtttgatttttttgttttagtttgtcgagtgtttgcgattgtaggcgcgcgtcgttacgtttgattggttttcgtattttgttagtggagacggggtttcgttgtgttggtcgggttggtttttagtttttaatcgcgagtgatttattagtttcggtttttcgaggtgttgggattgtagacggagtttcgtttatttagtgtttaatgatgtttaggttggagtgtagtggcgtgatttcggttcgttataatttttattttttagtagtttgttttggttttttaaagtgtcgagattgtagtttttgttcggtcgttatttcgtttgggaagtgaggagtgttttcgtttggttatttatcgtttgggatgtgaggagcgtttttgttttgtcgtttatcgtttgagatgtggggagtatttttgttcggtcgtttcgttcgggatgtgaggagcgtcgttgttcggtcgtttcgtttgagaagtgaggagattttttgtttggtaatcgttttatttgagaagtgaggagttttttcgttcggtagtcgttttgtttgagaagtgaggagttttttcgtttagtagttatttggttcgggagggaggtgggggggttagtttttcgttcggttagtcgtttcgttcgggagggaggtgggggggttagtttttagttcggttagtcgtttcgttcgggaagtgaggggcgtttttgttcggtcgtttttattgggaagtgaggagttattttgttcggttagttattttgttcgggagggaggtgggggggttagtttttcgttcggttagtcgtttcgttcgggagggaggtggggggattagtttttcgtttagttagtcgtttcgttcgggagggaggtgggggggttagtttttcgttcggttagtcgttttgttcgggaggtgaggggcgtttttgttcggtcgcgtttattggaaagtgaggagtttttttgttcggttattatttcgtttgggaggtgtgtttaatagtttattgagaaggggttatgatgataatggcggttttgtggaatagaaaggggggaaaggtggggaaaagattgagaaatcggatggttgtcgtgtttgtgtagaaagaggtagatttgggagattttttattttgttttgtattaagaaaaatttttttgttttgggattttgttgatcggtgattttatttttaattttgtgttttttgaaatatgtgttgtatttatttagg

SEQ ID NO: 7 - DNA, 2500 bp, Artificial Sequence
  chemically treated genomic DNA (Homo sapiens)
tattatggagattatttagtggttaattttttgcgagtggatgtttaggttggggtttgcgagggtaaggtgatcggggttaggagagatggtatttgtgtcgagggggttgaggatagggtgattgttaatagggtatggatttagtttgggggtagtgaggatatcgggattgaaggaagtttttttattttgatcgtttttatttgtcgtttttgttagttggagtttagcgtggacggtgttaagtagtatcggaacggggagttcgtgaagttttatttagaaatcgattttttagttttggtggcgttgggagttttggatatagttttgtatgttgtaggtagtaagttttataagttttttaatatgggtaaggtttgtttagattttttttatagtttttttatttttttatggtttatttttttgtttttttgagttttgggcgtagtttttggattttattgaggttttttatagttttttttttatttggttttgtggtttttattttttggttttgtatttttttttatttttttatgtgttgtttttttatttgtgtcgagtgtttagttttgttttttagttatatttggtttttagtatttttgttttttttgtaggtttttgaagttatgaatagttatgatttcggttgtggttttgggggtggggatagtgttttttaggtgttttaggtagcgggtttggttttttttgatggagattagtggattttatttagaaagagtgagaatagagaaggaaggggagtgggtggcgggaagataaggaaggaggaagggtttgaggggattagttggaagagttcgggtaggaagggttgggtaggggaaggggaggaggggaggaggtcgagtgtttgacggttggattgtagtttttttttttattaggattaagttgttttaaggagaagataattcggaaaaagagaaacgtgaatttttaaaaggcgattaatgagaaatgtgagttgcgggtgtttaggtagtagtttgggttttttatttgggattcgggttgggggtttgtttttttgtttttcggttttttgttgaatttacgtgtggtatttggggttagagattcgaatttcgggattacgagtggaaggtgggtagttttttttagtagttttttttatgttgttggttttaaggggtcggggcgggggttgaggtgtatgttttttttgtttttttatgtttatttttatttggttttgtagtgggttagtatgttttttcgatagttaagcgttgttgttaggatggggtgatacgtttgtttatgatgcgtttttgcgagtagcgggtagttcgcgtgtagtagtcggattgtcgggagttttttttgttttgttgttaatttgttgagagtttgcgtaagaagagtagggataagggttaggcgggtttttaacgaggtgaggggttgggtggggttagggtataggtggcggcgtttggaaaggtagaacggttttttttttattttcgtttatcgtggttttttagttttggagattttgtaggaggaggatttgattgatgaggatgatattttcgtgcgtagtttttttttagagaattggttttggagagtggaaatagtggatcgtttttaaatgtgagagtgtgtgtcggttcggttttttttttgtgttgtgtttcggggttagtcggggtagacgggttttttttgtttttttttatatagattgatattgtggtttttcgattttttgattacgtgggagatttatggtttgagtttgtttaaaattaaaggtgatgttattttgtttgggttttaggtgatttcgtttttatttttttgtattttagttttttgttttttttgtttttagtgtaggaagagggtttagtgatttggggaggtttgtgttagcgtgtagttggcgtgggttagagggtagaggcggattgagatagagttgggttatttttattttttttttttgtggttttgaagttttgatggtttttttgatttttgtttttgtgtttacgtttttttttttttaggtttatgtgtggttattttagtttagtttcgggtgtttcgcgagttttatttgtattttcgtttgtttatgtttgttcgtcgttttgagtagttggagttgcggtttgttttttataattatttggataaaaatttgattgtgaggttttatgggagtttgagtatataggagttgggggagttagggtttagtgaggggtggggaggttaatcgggttaggattttggttattttcgtttttttgtttttaggtgagcgtttacgtgtttttagtggaggggttgtgtttggttgggggcggagggttggtttagtaggtgttggtgtttgcgggttttgttcggtttgttgttttttttgtggtgtttacggtagtcgtcgttgtgtttttgaaggtggtggttcgagggtttttcg

SEQ ID NO: 8 - DNA, 2500 bp, Artificial Sequence
  chemically treated genomic DNA (Homo sapiens)
cgaaggattttcgagttattatttttagagatatagcggcggttgtcgtgggtattatagagaaggtaataggtcgggtagagttcgtaggtattagtatttgttgggttagtttttcgtttttagttaggtatagtttttttattggggatacgtggacgtttatttgagggtaggaaaacgaggatggttagagttttggttcggttagtttttttattttttattgggttttggtttttttaatttttgtatgtttaggtttttatggggttttatagttaggtttttatttaggtagttatagaggataggtcgtagttttagttgtttaaagcggcggatagatatgggtaggcggaggtgtaggtggaattcgcggaatattcggagttggattggggtggttatatataggtttgagggaaaggaagcgtgggtataggggtagagattagaggggttattaaagttttagggttataggagggaggggtgggggtgatttagttttgttttagttcgtttttgttttttggtttacgttagttgtacgttggtatagatttttttagattattggattttttttttatattaagagtaaagggaatagggagttggggtatagggaaatggaagcggggttatttgaggtttagatagggtgatattatttttggttttggataggtttaggttatggattttttacgtggttagagagtcggggagttatagtgttaatttgtgtagggaaaggtagagaaggttcgtttatttcggttggtttcgagatatagtatagagaaaaggtcgggtcggtatatatttttatatttgaaagcggtttattgtttttattttttagagttagttttttgggaagaagttgcgtacgggaatgttatttttattaattaggttttttttttgtaggatttttagggttgggggattacggtggacgggagtgaggaggggatcgttttgtttttttaagcgtcgttatttgtgttttagttttatttagttttttatttcgttggaggttcgtttggtttttgtttttgttttttttgcgtagatttttagtaaattggtagtaggataggaagggttttcggtagttcggttgttgtacgcgggttgttcgttgttcgtaggaacgtattatgggtagacgtgttattttattttggtagtagcgtttggttgtcggggaagtatattgatttattgtagggttaggtgggggtgagtatgagaggataaaaaggatatatattttagttttcgtttcgattttttgagattagtaatataagagaggttgttggagagagttgtttattttttattcgtaatttcggaattcggatttttggttttaaatattatacgtgggtttagtaaggagtcgaggggtagagaggtagatttttaattcggattttaggtggagagtttaagttattgtttaggtattcgtaatttatattttttattaatcgttttttggaagtttacgttttttttttttcgggttgttttttttttgggatagtttagttttggtagagagaaaggttgtagtttagtcgttaggtattcggtttttttttttttttttttttttttgtttagttttttttgttcggatttttttagttggtttttttaggttttttttttttttttattttttcgttatttattttttttttttttttgtttttattttttttggataaggtttattggtttttattagaaaaggttaggttcgttgtttggaatatttgaagggtattgtttttatttttaggattatagtcgaggttatagttgtttatagttttaaagatttgtaagaaaggtaggaatgttaggagttaagtgtggttgaggggtaggattgagtattcggtataggtgagagggtagtatatggggggataggaaaggatatagagttaggagatggagattatagggttaagtggggaagagattgtggggagttttagtgggatttaggggttgcgtttaaggtttagggaagtagggggatgagttatggaggggtgagagagttgtggagagggtttggataaattttgtttatgttgaggggtttgtgggatttgttgtttgtagtatatagagttgtgtttaaggtttttagcgttattagggttagggagtcggtttttaagtggagttttacggatttttcgtttcggtattgtttggtatcgtttacgttgagttttagttggtaggggcggtaggtgggggcggttagagtgggagagttttttttagtttcggtatttttattgtttttaagttaaatttatgttttgttggtaattattttgtttttaattttttcggtataagtgttattttttttgatttcggttattttgttttcgtaggttttagtttggatatttattcgtagggagttggttattgggtggtttttatggta

SEQ ID NO: 9 - DNA, 2500 bp, Artificial Sequence
  chemically treated genomic DNA (Homo sapiens)
gtggtaggagcgtagaagattttgattttttttttcggttttaagatcgaatgtgtgttaggatatgtggttagggaagagaagttatttaattgaattagtaatagtagtaggaaaagaaaaagtggagggagggtagtttaggtagggggtttggaataagtaattgtattaatagaggtagttggtgcgagtatagaattattttaggttgggattttgttatttagttttttttgtatggttgttcgtgtttttggagatttgtgtaaatattaatggatgaggaggagagatggtttttagagtttagtttttatttttgttggttttttattgtttttaggtatttggtgaatgttggagtttttatcgttcgagatgttgggagttggtggttagttgtgtttggagttgggagatttattaagtattttgttaaaggtattttatttgtagtttaagtttgtagttttttattttttggtggttttttaggtttttaggttttatttatttttttttttttttgtgttatttttttagggcgttaggttgtttttagtatggttcggaaggtaaagtatcgggaattgtttttattagagtttttgggtcggcgggcgtttgtcgtggtgcggtttggttttatttattatgtgtacgattttattggggtttagttagtggattggtgagtttttttttggtttttggtagattatggagtaatgatttaaagtgggatttttttttagtttatgtttagttttttagtgaaggttagtggtttttatttttttttggaattcgggagtatttttttttaagttttaagttttttttatagtttgagtttaggcgtttggttttagttttgttttttttttgtatagtatttttattattttaggaattttttttcgtttgttagagatatgaagattttgtttattattgtttagttttttagagtgggtcgggaggggattagaagagttgtatgatggtggttgagatagggttattttgggaaggtttgggagttaggatgagtgtcgggttttcgtgtgtgtaaaaggttagatgtgattgttgttgtttgtttggtttttgatttagtggtggggtttgagtaatgtttttttgtttttttatggaaagtggaattagaaatggtgttaaggttgtggttgttttttttcgtgtaaaatggtgttgttattattttgttttgaaataggaaggtgggatttttggggaggttggtgaaggagggtagggtttttttttttacgtgttatgttaaaattgttaaataaagtatttttgtttgtgatattttttggatgttttttatttattgtgacgtgtgtttgggtgttttgtttaggggtagaggtgaagtttgagttttgttttatttagagaggaaaggggttaggggtttattttgacgtttaggttattttttttgtggagtggtgagggtgtatttaattttttaaattacggaatttttgttagggtttaaaaaagtaaaagtttagtatagtttaatttgtgttggaatgaaagtaagagataagtgttttagaagtttgttattgttttgtgagggtttttaaatattttgtattcgtgggttatgttgggtttttgtacgtttaggtatatatgagtttgtgtgtatttatattttgatatagatatatttggtagggggaggtgtttaggtattggaatgagaggagttaacggggaaggatagggttatttttgggttaagatttagagttttttatggatatttaggtgttcggggtgtttttataattttgggtttgaggttagttgtattttttggttgttacgtggttttttagtttagttgggttgggggaggagtaaggtttagagttaattttgtttcgaggtttagtttggttagaaggtagtagatagatagacggatttaattttttttggattttttagttatgaggttgttttgggggttgatttgggtatttagtttttttattttatttttgtagaagtttaggttttggaggcgggatgttgggtgtttggattggggtagggttggtatcgggattcgatttaggagtgagggagagtaggggtggaggtgttagagcgaagtttgattgttgattttgtttgttttttttaggttgtttttgttttttttttttgtggtttatttgggggtttttttatcggtgggggtgtagttttaggatgtgtttcgaggataggtagtgaaaggattagtgtttttgagaaatttatttcgtaataatgttttttgttttttaaaggtggattttatttttagtttagaaagagatttcgtattttttagtttttaggtaattagattttatgtttttttgttgtttgtgggggttttttgttttgtttttatttgttttgtaagtgttattatttttttattggttttttttttttttgt

SEQ ID NO: 10 - DNA, 2500 bp, Artificial Sequence
  chemically treated genomic DNA (Homo sapiens)
ataggaggggaggaggttagtgggaagatgatgatatttataagatagatgggaatagggtaggaggtttttataagtagtaggagggtatggggtttggttatttggagattgaggagtgcgaagtttttttttgagttaagggtgaagtttatttttggggagtaggggatattattacgagatgggttttttaggaatattgatttttttattatttgttttcggggtatattttggagttgtatttttatcgatagggggatttttagatgaattatagaaggagagaataagagtaatttggggagaatagataggattagtagttagatttcgttttgatatttttatttttgtttttttttatttttgaatcgggtttcgatgttagttttgttttaatttaagtatttagtatttcgtttttaggatttgggtttttgtagagataaggtgaagaagttggatgtttagattagtttttagagtagttttatggttggaggatttaagagaggttagattcgtttgtttgtttgttattttttggttaagttaggtttcggggtagagttgattttggattttgttttttttttagtttagttaagttgggaaattacgtgatagttaagaagtgtaattggttttaggtttagagttgtgggggtatttcggatatttgggtgtttatgggaaattttgaattttggtttagaaataattttgttttttttcgttaattttttttattttagtgtttgagtatttttttttattaggtatatttgtattagggtataggtgtatataagtttatgtatatttgggcgtataagggtttaatatggtttacgagtataggatatttaaaggtttttataaaataatgataggtttttaagatatttgttttttatttttattttaatataaattgaattatattaggtttttgtttttttaggttttaatagaaatttcgtggtttaggagattaggtatatttttattattttatagggagaatggtttgaacgttagagtgaatttttgattttttttttttttgaatgaggtaaagtttagattttatttttatttttaaataaggtatttaaatatacgttatagtaaataaaggatatttagaaaatattataggtagaggtattttatttggtaattttaatatgatacgtagagaaaagaattttgtttttttttattagtttttttagaaattttatttttttattttaagatagagtaataatagtattattttatacgaaagggaatagttatagttttggtattatttttggttttattttttatggaagggtagagaagtattgtttaaattttattattgggttagaaattaggtaaatagtagtagttatatttgattttttgtatatacgagagttcgatatttattttggtttttaagtttttttaaggtgattttgttttagttattattatgtagtttttttagttttttttcggtttattttgaggagttgagtaatgatgagtagaatttttatgtttttggtaggcggaggagggtttttgaagtggtagagatgttgtgtaggagaaagataaggttggagttagacgtttaggtttaagttgtgaggagaatttagaatttgggaaggggtgttttcgggttttagagaagaatgagagttattggtttttattaggaaattaagtatgagttgggaggaaattttattttgggttattgttttataatttgttagaggttagggaaagatttattagtttattagttgggttttaatgaggtcgtgtatatggtaggtgaggttaagtcgtattacgataggcgttcgtcggtttaggagttttgataggagtagttttcggtattttgtttttcggattatgttaaggatagtttggcgttttagagaagtggtataggaaaggggaaaggtgaataaggtttagaggtttgaggagttattaaaaggtgaggggttgtaggtttgagttgtagatgggatatttttaataaagtatttgatgaattttttagttttaggtatagttagttattagtttttagtatttcggacggtgaggattttagtatttattagatgtttgagggtagtgggaagttagtagagatgagggttgggttttgagaattattttttttttttatttattaatgtttatataagtttttagaaatacgggtaattatgtaagagagattggataataaaattttagtttggggtggttttgtgttcgtattaattgtttttgttggtgtagttgtttgttttaggttttttatttggattgttttttttttattttttttttttttgttattattattggtttagttaaatagttttttttttttgattatatgttttgatatatattcggttttaggatcgaggagaggaattagagttttttgcgtttttgttat

SEQ ID NO: 11 - DNA, 2212 bp, Artificial Sequence
  chemically treated genomic DNA (Homo sapiens)
ttttagttttaagtgtgagttatttttggggtatttttaatttaggtttttggaagtttttgggggggtatatttggtggggagaaagtaggggttggggaggtcgaagaaggttaggtttttagttgtttttattagtttttattttttagtttttaattttttttgtagataagttggtgtttaggaattattcggatttgtttttgggagattattttttgttttggaaagtttataagaagtttattcgtttagttttgttgttgggtattcgtgattttatggagttagtggtggagtagttgatttaggagttttgtgaggtaaggttgggtttttgaggttatttcgggttagtttcgttttttatagtagttttcgttttgttcgttgtatagcggtttgttgaatttatattgtttttttatagcgtatgagagtttagttcggtatttttgtggttattgaggaggaattttttttttttatttgtagtattatttgttattttattttcggagataagattaaggtgttttatagttttttaggtttatttttagtttttttttgagtttttttttgttttgaattgaaagtattttttttttttttggtaggacgataatttaatgtttgtttattataaatgtatttaggaggtgttaaaaatttggagttattggtttatttaaattgtggacgtgatttttttttttagggtgaggatttggagtttagatatttttgggttgtaggggagaggttggggtggagggagaggtttttttttatagttgtatttttatgttttttgtcgtagtttttttttaatttaggttttcggaggttgaagtaggttatagagaagagggattatatcgtggagatgtagttgaggtagtataaggtggggattgtacgtggacggttttttttcggtttatagttagtgatgttatcggttttagtattgttatgaggcgggtttttttgtatattttagttatgggtttgttgttattttgtatttttttttttaggttagtcgtttagttcgttttttttattttttgtaggagagtttcgtggtaggttagtggagggatatgatggattatatgttttaaggggtggcgtagtcgagtatggaagagggttttggatagtttttggaagggtacgtgtatatggttgtagtggattttttgatcggtggtattgagattatagtaaatatttttttttgggtcgtggtttttttgttttattattttgaggtgcgttttggggataagtaaaaggtttttttttagtaatttggttagggcggtgggtatttttatttagttttgagtattgtgcggttggggttgtgtttgttttatcggtatttaggtttattgggttgttgagggagcggttggaggttgggtagttgtgggttgttggggtaggattttattcgattattttttagatttagtagcgattgtaggaggagttagattacgaattgggttttggtgtttttagttttcgggttttttataaggatcgtgtacggttgtttttgtttaatgttattatcgtcgaggtgttgcgtttgcggttcgttgtgtttttagttttgttttatcgtattatacggtttagtaggtgattttcgagggttggggatgagtgaggaaagttcgagtttagggaggttttggttagtttttaattttagttttttttagtattttcggttacgatatttttgagggtatagttattatttcgaatttttaaggcgtttatttggatgagacggtttgggagaggttatatgagttttggtttggtatgtggggggtcgggggtttgtcgtgaaaatgtggtggaggttggttttcgttgtcgttgaacgtttttttatttatttgtttattcgttcgtagatcgttttttggagttaggtaagaattttagagttttggttttcggttgcggtgttcgcgtgtgtttgggcgagtcgttggcgcgtttggagtttttcgtggtgttgattcgattgttgtaggtttttacgttgttgtttttcggggacgttttgttttttttgtagtttttgttttattgtagtgttatttttaagatgtagtttttttaagtgcggttgtagtttcgggggatgggggtttatagttcgggttagagttagtga

SEQ ID NO: 12 - DNA, 2212 bp, Artificial Sequence
  chemically treated genomic DNA (Homo sapiens)
ttattggttttggttcgggttgtgggtttttatttttcggggttgtagtcgtatttggaaaggttgtattttgaggatgatattgtagtggggtaggggttgtagggagggtagggcgttttcggagggtagtagcgtgaaggtttgtagtagtcgggttagtattacgaagagttttaggcgcgttagcggttcgtttaggtatacgcgggtatcgtagtcgaaggttagagttttggagtttttgtttggttttaggaagcgatttgcgggcgggtggataggtgggtggggaggcgtttagcggtagcggggattagtttttattatatttttacggtaggttttcggttttttatatattaggttagaatttatgtggttttttttagatcgttttatttaggtgggcgttttggaggttcggaatgatgattgtgtttttagggatgtcgtagtcggagatgttgaagggggttggagttagaggttggttaggatttttttgggttcgggttttttttatttatttttaattttcgggagttatttgttgggtcgtgtggtgcggtggggtaaggttaagggtataacgggtcgtaggcgtagtatttcggcgatggtggtattgagtaagggtagtcgtgtacggtttttgtaggggattcgggagttggaggtattagggtttagttcgtggtttagttttttttgtagtcgttgttgaatttggggaatgatcgggtggagttttgttttagtagtttatagttgtttagtttttagtcgtttttttagtaatttagtgagtttgagtgtcggtgaggtaagtatagttttagtcgtatagtgtttagagttgagtgagggtgtttatcgttttggttaggttgttgggaaggagttttttgtttgtttttaggacgtattttagggtggtgaagtaaaaaaattacggtttaggagagggtgtttgttgtggttttagtgttatcgattaggaggtttattgtagttatgtgtacgtgtttttttaggagttgtttagagtttttttttatgttcggttgcgttattttttggagtatgtagtttattatgtttttttattggtttgttacgaggtttttttgtagagggtgaaaggagcgggttgagcggttggtttggggagaggagtatagagtggtaataggtttataattggggtatgtaaaagaattcgttttatagtaatgttgaggtcggtagtattattggttgtgggtcgaggggaggtcgtttacgtatagtttttattttgtgttgttttagttgtatttttacgatgtgattttttttttttatggtttgttttagttttcggagatttggattggggaagaattgcggtaggaagtatgagaatgtagttgtgggaaggagtttttttttttattttagttttttttttataatttaggggtgtttaggttttaggtttttattttgagaaagggaattacgtttataatttggatggattagtggttttaggtttttaatattttttggatatatttgtaataggtaggtattaagttgtcgttttgttagaaaaggagggagtatttttagtttaggataaggagaggtttagggaggggttgggggtgggtttgaggggttgtgaggtattttgattttgttttcgaaggtgaggtaatagatgatgttgtaggtgaggagagagaatttttttttaatggttataggggtgtcgggttgggtttttatgcgttgtggagaaatagtgtgagtttagtaggtcgttgtgtagcgggtagggcgggggttattgtgagaggcgaggttgattcgaggtggttttaggagtttagttttattttatagaatttttgggttagttgttttattattggttttatggagttacggatgtttagtagtagggttgagcgggtgagttttttgtgggttttttagagtagggagtagttttttaaggataggttcgggtagtttttagatattagtttgtttgtaggaggagttgggggttggagggtgggaattgatgaaggtagttgagggtttgatttttttcggtttttttaatttttgttttttttttattagatatgtttttttaagagtttttagggatttggattggggatgttttaaaggtggtttatatttgaggttgagg

SEQ ID NO: 13 - DNA, 2500 bp, Artificial Sequence
  chemically treated genomic DNA (Homo sapiens)
gagaaggagttaggtaaagagtaggggtagatgagggtatttggggtagaaggagaatatataaaggtttagaggtcgggggtaggatagggtatttttggggatattgtatgtaattgattatattcggagtttggatttggaagtggtggaagagatggagatggtgagataagtagtaagtacgttagttttttaggtgcgttttttttcgatgagtattgttttattttacgtaattttgagaagtttgggttttttttattgtggtagaggttttttgaggtttttgtatatatggttttatggttgtttattagattttttttttagtagttgtttagtatggtggtggtataagtttatttttcggagttagggatttagttgtagtaagatatggttcggtttgggaggttaattatgaagaaggtagtagttgttattgtttaattttagaaattttaattttgtttttttttttttagttttgattatggatttagtagtagcgaattcgttaatgtagtgggtggtatagttagggttttgattttggttttgtagtagtatagtttggaaaagttttgaggggagagagatttttattggttcgagggtttggtatagagttagaaatgggggggaaggtatggggttgggtcgtttttgattttttaggtattatttaggaggttttggttttttattgaattttgttatttttttttggtatggtttttttttaaatttttaaattgtttttttatttataaaagtggtttttgagtgttagtttagtgggatttttattttttatggttttagttttttaaatagggttggatttttgattttgatttagttgtggttatttagtttttttttggggattttggattttgaggggggtatgtttagttgtgttgggaatttatattttttttggttggagtagaatttgtggattgtagttttgagggtagttatgttttgtttgtgtttggaaatataagaaatttgattgtagagagaagaaagaggagagaggaatagagcgaggaaatcgttcgttttcggggttttttttgttttttatttttgattttttaagattagtggggtttttttttttgttttttttttttgagttttgtgaaattttttaatttttattttttattttaaattagtttaaggtgggttgttttttttttaattaaagaaaggtgtttttggtggttaaaggtatatattcgatagttagatttttaggttggaattttgttttttataatatgcgaataatattcgtgttgtatatagagtatggttgtgaagagttgagtgagtgtttataaagtatttagagtagtgtttggtatatgttattatttcgtagcgggaaattatttttttttttgttttttgggtatttttgtgagtgaagggaggtattaataataattatattgggatatttgtatatattggaatgttttaggtaaattaggtttaaattgtattattttatttgtagtttaaattaataaataatttatataaattatattttgttttttaggcgatttaggaaggtttattaggtagggattgttattttttttttgagataaatattatgttagtaaattggtttacggtggggtggtagagggagagggtttaggtgggggcggatattattgtttgtatagttgatgtggaattagaaagttgattttggatgtaggaaaaaggttagggttgtattttttttttttgttttttgatgggtgattaatttttttgaaatacggacgttttaaggttaatgagattggtgttattttagaaaagggttattttgtgggcgggtcggtgggagggtatttgaaggtggggttaagggaggttttaaaatagtttatatagtaggagggatggttggggtttttgagttataagtggtattttagggttttgacgggcgtttcgttatgttgtttttgggtttgttgttgttgttgtttttgttggttggcgttcgtttgttgtggaattggtggaagtttcggagtttttatttttcgttttttgtttcgggttttttgtatttgttgtagttcgattttttaatttatttgtttggtttgatttagaaattcgggtttatttataggttttattttgggttgtaaggtgagaggttgatttcgttttggtttttattataggagggggcggaggtgacggagagggtttttttttcgttgacgttgttttggttgttttttagatgtggtggtgttgaattttaagaggattattgaggaagttatggttaaaaagtgggtagattttgttggtagatttgagttatttatttgtaagggttgggggtatttttttttttttaaaaaaatttttttttaagagatgggtttttgttatgttgtttaggttggttttaaatttttagttttaaatgattttttta

SEQ ID NO: 14 - DNA, 2500 bp, Artificial Sequence
  chemically treated genomic DNA (Homo sapiens)
tgggaggattatttgagattaggaatttaagattagtttgggtagtatagtaagaatttattttttaaaaaaaaatttttttaagaaagaaaaaatgtttttagtttttataggtaagtggtttaggtttgttagtaaagtttgtttattttttgattatggtttttttaatggtttttttggagtttagtattattatatttgggagatagttaaagtagcgttagcggagagaggatttttttcgttattttcgtttttttttatggtgagggttagagcgagattagttttttattttgtagtttaaggtggagtttgtagatgggttcgaatttttgagttaggttaagtagatagattgggaggtcgggttgtagtaagtgtaagaagttcggggtaagaggcgggaggtggaggtttcggagtttttattagttttatagtaggcgggcgttagttagtaggggtagtagtagtagtaggtttaggagtagtatggcgagacgttcgttagggttttgaggtgttatttatagtttaagagttttagttattttttttgttgtgtagattgttttggggttttttttgattttatttttaggtatttttttatcgattcgtttatagagtggtttttttttggaatgatattagttttattggttttgggacgttcgtattttaaaaaaattgattatttattaagaagtaaggaagggaaatgtaattttgattttttttttgtatttagagttagttttttggttttatattaattgtgtaggtaatagtgttcgtttttatttgggttttttttttttgttattttatcgtgggttagtttattggtatgatgtttgttttagagagaaaatggtagtttttgtttaataggtttttttgaatcgtttgaagaataaaatgtgatttgtgtgggttgtttgttagtttaagttatagatagagtaatatagtttaagtttggtttgtttggggtattttagtatatataggtattttagtgtgattgttattagtgtttttttttatttataaaagtgtttagaagataaaggaggaagtggtttttcgttgcggagtaatagtatgtattagatattgttttaagtgttttgtgggtatttatttaattttttatagttatgttttatatgtaatacgggtattgttcgtatgttgtggagggtaggattttagtttggaaatttagttgtcgaatatgtatttttagttattaggagtatttttttttggttgaaaggaaaatagtttattttgagttggtttgagataaaaaataagaattggggaattttatagaatttaggaaaaagaagtagaggaggggattttattggttttagaaagttaaggatagggaatagaaaaagtttcggagacgggcggttttttcgttttgtttttttttttttttttttttttttgtagttaagttttttgtgtttttaggtataggtagaatatgattgtttttaggattatagtttataggttttattttagttagggaaagtatggatttttagtataattgggtatgttttttttaaagtttaaagtttttaggaaggggttggatagttatagttggattaggattaagggtttagttttatttggggaattgaagttataaggggtgggggttttattggattgatatttagagattatttttgtgggtaaggaggtagtttggggatttgggaagaggttatgttaaagaggagtggtagggtttagtgagaggttagggttttttggatggtatttgagaggttagaggcgatttagttttatatttttttttttatttttggttttgtgttagattttcggattagtgggggtttttttttttttagagtttttttagattgtgttattgtagagttagagttaagattttggttgtgttatttattatattggcgagttcgttgttgttgaatttatgattaggattgagagggagaaaataggattgggatttttggggttgggtaatgatagttattgttttttttatggttgattttttagatcgggttatgttttgttgtaattgaatttttggtttcggaaaatgggtttatgttattattatgttgagtagttattgggagaaagatttgatgagtaattatagggttatgtatgtaagagttttaggaaatttttgttatagtgggaaaggtttaaattttttaaagttacgtgggataagatagtgtttatcggaaaggagcgtatttggaaggttgacgtgtttattatttgttttattatttttattttttttattatttttaaatttaaatttcgaatgtggttaattatatgtaatgtttttaaaggtattttgttttgttttcggtttttgggtttttgtatattttttttttgttttagatgtttttatttatttttgttttttgtttggttttttttt

SEQ ID NO: 15 - DNA, 2500 bp, Artificial Sequence
  chemically treated genomic DNA (Homo sapiens)
gttaagttttatgtttatattaatgagttttgtattgtttttaaggtttatttagttaaaaagaagttgaatttggtttttgtcgttattatttttaatgagttttttgggaataatttttttatatatttttttttggattttataaatgttgaaaatattgttttttagtttttaaggattcgtggttttcggcggtagatttagcgtttggagtagttgttggcgttttatgtggtagagattcggcggttgtaggaaaaggagttggattttttagaattggatgatttagatttcgtatatttgtaggaggtacggttgaagcgtaagttgattcgtttttttgggcgattatgtgagttgaaagattgttttttattgatcggtcgtgttatagagtagcgtattttttatcgtggtattcgttatttagaggttaataggcgtattgagcggtttattaataagttagggtttgatattttttttgattatggggatgtgtttcgggttgtagagaaggtagttgttcgatatagttttggtttttttcgatagtagttttagtttatggtttaggatgtttttcgagatgtgggtattaggttataggagcgacgttatttcgattttatttataattttggttgttattttatagatgattataggttaggtagggggttggtgggatgttttttagtgatttttatatgttaggtatgaggcggatggggtatttttttagttttttttagggtttttatttttttagtttttttaagggttgagtgttttgattttatgtttttttacgtaggcgttgattttgtattattagattttgtgttggttcggcgttttcgggaaaatcggagtttggttatgagtcggttggatgaggttatttttaaatatgtaatgttgtaagataaaagtgaggagggcgagagaaaaaagagaagagttcggttttaaggtatttttttttattttgtagatattttcgaagtttttttggattttggtgaggtgtggatggggtatagtttttagagagatattgttttttttttgtattggttattagggagtttaggttgattgatgggggagtatgagaaggaaagtaagaattaaattttttggggtaagggattttttagagaaatttttttgttttttagggttttagtggaatggtattttaggggtgtttttttgtttttagagttgagatagatgacgaagacgatgaggagagtgatgaggaagaggaggaggaggaggaagaagaagaggaggaggttatagattttgaagaggaggaggatttggaatagatgtaggagggttaggaggatgatgaagaggaggacgaagaggaagaagtagtagtaggtatgttaagggaatattttttttatttgttatttttgttttgttaggtatgagttatttgtttgaaatttttttttttttttttttagtgtttttttagtagtatttttttttttttatttttaggttattttttttttttttttttttttttaggtaaagatggagataagagttttatgtttttattatagatttttaatgaaaagaatttggaatttggtaaatagattagtagatttttaggggagtagtaaaataaaggacgtatagtgttattatcgttattgttagaagaatttttggttttttttagtatagatgttgaaagtaatggagaatagtttgaggagttgattttggaggaagaaagttttgtgttttagttttttgagttagagattgaagttttgtttttggatatttttttttttgtggagacggatatttttttttttaggaagtaattagaggagttttttattattgttttagagaatggagtaggtatggttttttttattttttttaatggaggcgtttttttttataattggggagattttggttttttttgtaaaaaatttcggaaggagaagaagtaaataggattagggttattaggaaataggtaataataagaggaggaggaagagggaagttaaggagggattgtaggggattttcggagagtaatattggggaattgagtttgttgggagagattggattgtttttttttagttttagttttttcgtatttttttatatatttatgtttttgtttttagttatgtggaaaggtaaaggttagtgtatgagaagaatgggaaaaagatatgtattttgtttagtttatttttttttttggtttttttggttttagttgttgatttttttacgagggtggatttttttagttatggtttggtgattagttttttttgtattttttttttagttcggttgttttaaattttttatttatagttttttcggtttggtatttgtaaggtaagaaggggagggcgtgttttttttgataatttgtttttttttattggttgttttagttgttttgtttgaatattttacg

SEQ ID NO: 16 - DNA, 2500 bp, Artificial Sequence
  chemically treated genomic DNA (Homo sapiens)
cgtggaatatttagatagagtagttgaaatagttaatgaaagagaataaattgttagaggaaatacgtttttttttttttattttgtaagtattaggtcgaggaggttgtgaatggggggtttgggatagtcgggttggagaagggatgtagagggagttggttattaggttatggttgggagagtttattttcgtggaggaattagtaattggggttaaggaagttaagggggaaggtgggttgggtagggtatatattttttttttattttttttatgtattgatttttgtttttttatatagttagaaatagaaatataaatatgtggaggggtacgggaagattgaggttggaggggggtagtttagttttttttagtagatttagttttttagtattgtttttcgaaagttttttgtaatttttttttggttttttttttttttttttttttgttattatttgttttttaatggttttgattttgtttgtttttttttttttcgagattttttgtaggggggattagaatttttttagttgtgaggagagacgtttttattgaaggaagtagaagagattatgtttgttttattttttaagatagtggtgaagggtttttttgattgttttttggaagaggaaatgttcgtttttatagaggaaggggtatttaggggtaaagttttaatttttagtttaaagagttgagatatagggttttttttttttagggttagttttttaggttgttttttattgtttttagtatttatgttggagggggttaggggtttttttgatagtaacgatggtgatattatgcgttttttgttttgttgtttttttgaagatttgttgatttgtttgttaggttttaggttttttttattggagatttgtagtgaggatatggggtttttgtttttatttttatttggaaaagaagaaaaggggagagggtagtttgagaatgagggggaaaaaatattgttgagaggatattaggaggaggaagggaaaggttttaaataggtggtttatgtttaataaaatagaaatgataggtgaggagaatgtttttttgatatatttgttgttgttttttttttttcgtttttttttttattatttttttgatttttttgtatttgttttagattttttttttttttagaatttgtggttttttttttttttttttttttttttttttttttttttttattattttttttatcgttttcgttatttgttttagttttggaggtagaagggtatttttgggatgttattttattagggttttgggagataaagaagtttttttaaggaattttttgttttagagggtttggtttttgtttttttttttatgtttttttattagttaatttggattttttggtggttagtgtaggggaaggataatgtttttttgaaggttgtattttatttatattttattagaatttaaggaggtttcgggggtgtttgtagagtgggaagaggtgttttggagtcgagttttttttttttttttttcgttttttttatttttgttttgtaatattgtatatttggagatgattttatttagtcgatttatggttaaatttcggttttttcgaaggcgtcgggttaatataggatttgatagtgtagggttaacgtttacgtgggaagatataaagttagagtatttagtttttgaagggattagaagagtaaaaattttagaaaggattagagagatgttttattcgttttatatttgatatataagggttattgagaggtattttattaattttttatttggtttatagttatttgtgaggtggtagttaaagttgtagatgagatcgaggtgacgtcgtttttgtaatttgatgtttatatttcggaaggtattttgagttatgagttggagttgttgtcgggggaggttaaggttgtgtcgggtagttgttttttttatagttcgaagtatatttttatagttagggaaggtattaggttttggtttgttgatgagtcgtttaatgcgtttgttaatttttgggtagcgggtgttacggtaggggatgcgttgttttatgatacggtcggttagtgaagagtagttttttagtttatatagtcgtttaaagaggcggattagtttacgttttaatcgtgttttttgtaggtatgcggagtttgggttatttaattttgagagatttaatttttttttttgtagtcgtcggatttttgttatatagagcgttagtagttgttttaaacgttggatttgtcgtcgggaattacgggtttttggagattgagaggtagtgtttttagtatttgtggggtttaaggagaggtgtgtgggagggttatttttagagggtttattggaggtggtggcggtaggggttaagtttagtttttttttggttgagtgggttttgagaatagtgtagagtttattgatgtagatatagagtttggt

SEQ ID NO: 17 - DNA, 1425 bp, Artificial Sequence
  chemically treated genomic DNA (Homo sapiens)
gacgttttttttatcggtgaggttggggggaggtataggttttggtatagggaagtagagtttgggagattcggtcgtttggagttttgtttttaatttattttcgtttttaaattttcgcggtttttcggatttaggtcgggagtttttcgtaggtttttttaaatggattaattatcgaggagttgagatcgtggcggatacgtttcgggtgcggagcgggattagtttagggagggagggggtgtaggtgggggtcggaagggtttgggcgttcgttgaggaaatgagaggtagagagtagtttatgtttgaagatattttattatttttttcgcgtttttgaatattttttttcgttttttttaggatttcgtcgtttttattgtgttagtttcgggttttttttatttgcgcggtttttgcggtatggggggatttcgtattgttgtggtaggtagtagcgacgttgtttaaaaggttgttcgggtgaggagggggcggggttaacgaaagtgggcgtagttttgggttcgggaggtcgggagttgggaggtttaggaaattagttttaatttttgtttttaatgggttgtttattttatatgaaagaatataggagaaaataagaagttataatagtaggattgggaataggggtgattaatttgttttttcggagttttaggaaattttaaaggtggtatttaaattgtgattttaaggatgggtaggatagataggaggggttggggaaggtagggggttgaaaataattgtatgtgattttaaggtggaaattagtaaaggtaattaaagtatttagtgtttgatatatcgtaagttttatgtgtttgttgttattattttttataaatgttagttcgtttttagtttttagtggtggttgagtaggtagatatagttgtggagaggttttgagattcgaatatttttttttttttttaggtaatggtagtgttgatagattatttatatgtttttttgatttttttagatgacgtagttgttgattgttttttttttcgttttgggttgtttggtgtgttttttttttttttgtatcgtggaggtggggatttgtttaatagttaggaggtgagagagggtaggaattttaatattaagtattattagagaaaagagttttaggtttttttagtgggaggaaggaagggtattttttttagaagtttgggtggggttattttgagttggttggaagagtggtttggtttagtttgaggttttatttttttttttttattttatgttttttttgtgtaggtattgtagaagttttttgatgttattttggtatttgtgttttgtttagaattggagaaggttggcgtcgggtttagttttttttgtttggtgtttagtatacgtttttatagttga

SEQ ID NO: 18 - DNA, 1425 bp, Artificial Sequence
  chemically treated genomic DNA (Homo sapiens)
ttagttgtgggggcgtgtgttgagtattaagtagagggagttgagttcggcgttagttttttttagttttgagtaggatataggtattagggtgatattagagagtttttgtagtgtttgtatagggaagatatggagtggggagaggggagtgagattttaggttgagttaggttatttttttagttagtttagagtggttttatttaggtttttagagaaggtatttttttttttttttattaggaaagtttgaaatttttttttttgatggtgtttggtgttggagtttttgtttttttttattttttggttgttgggtagatttttatttttacggtgtaggaggaaagggggtatattaggtaatttaggacgaagaaagagatagttagtagttgcgttatttgggagggttagggaggtatatgggtgatttgttagtattgttattgtttagaggaaagaggaagtgttcgagttttagaatttttttatagttgtgtttgtttgtttaattattattaagggttggggacggattgatatttgtggaaaataatgatagtaagtatatagagtttacgatatgttagatattaagtattttagttatttttgttaatttttattttggaattatatgtagttatttttaattttttattttttttagttttttttatttgttttatttatttttagagttatagtttaggtgttatttttggggttttttgaaatttcggaagagtaaattaattatttttgtttttagttttgttgttgtaattttttatttttttttgtgtttttttatgtaagatggatagtttattgagggtaggggttagggttaattttttaagttttttagttttcggtttttcgggtttagaattgcgtttattttcgttggtttcgttttttttttattcggatagttttttgggtagcgtcgttgttgtttgttataatagtgcgaggtttttttatgtcgtagagatcgcgtaggtgggagggattcgagattggtatagtggagacggcgaagttttagggagagcgaagggaggtatttaggggcgcgggaggggtgatggggtatttttaaatataggttgttttttgttttttatttttttagcgggcgtttaggttttttcgatttttatttgtattttttttttttttaggttggtttcgtttcgtattcggaacgtgttcgttacgattttagtttttcggtgattggtttatttggagaggtttacgaaaaattttcggtttgagttcgggaggtcgcggaggtttgagggcgggagtgagttagaaataaggttttagacggtcgagttttttaaattttatttttttgtgttaagatttatgtttttttttagttttatcggtgaagagaacgtt

SEQ ID NO: 19 - DNA, 2500 bp, Artificial Sequence
  chemically treated genomic DNA (Homo sapiens)
ataattgggtttaagatgttttgaatttgataagaggtggtagtcgagttttttaggattttagggtttggagattttagtatagggttttgagattagtataggttaggatagttttttttgtagtaggggaggggagagtagttatttgggtttgtaaggagatgttatttagaatagttttatgtggggtaagttttttgggtttgaggaatagagtagggatttttaaattttaatgggtataggttatttgggaattgtgttaaaaggtagattttgattgagtaggttaagggtgagtttgagattttgattttttttatgtttttaggtattgttgatggtttagggattattttgggtttagagggttataggggatagtaagattagaaggtgttggggttttttttgttttttttttagaattttggatttttatgtgggagggtagtagggtgagttggtttaggtttatttgatgtttaattttattatatttttaataaggaattgtttaattttttttgggatatatttattttttaaaagttaaaatgatttttatatttttttatatattttatgattttatataaatgtatttatgttataagatttagaaaaatagtataattaatttgtttttttaaatttgttttttttttgtttcgtttatgttaatttttgttatattgtattttattgttatattttattatatattttttttttttagacgtatatataggtatatatataaatatgggtgtttgtttattttatttttaaaaggtgggatattttttatatttttgttgtttgttttttatatttaatagatatatatggaaattatataaagttaggaatatattgtttttttgttattttttatagttgtatagtagttaataaattttattttttttaattttagtttgttttttgtgggtatttatatattttatagatttatgttttataaaaggtattataataaatatttttgaaatttttttttttatttttattttttattttttttaaagagatggggttttattatgtttattaggttggtttttaatttttggttttaagtgatttttttatttcggttttttaaagtgttggggttataggtatgagttattagatttagatttgtatatatgtttttattttttggtgtttttttttcgagggaatgttgggtcgaagaggatgtgtatttttaattataatagatattgttagattgttttttaaatagaagataatatttatttttgttattgagtatggtgtttttttttttattattttttattatttttatatgttatagttttaaaaaaatattttgttagtttgtttggtatttttttgaggttggtgaatttgattattaaaaaaaatgtttgttggtaatttggttttgtttttttgtgaaatgattatttatattttttggttgtttttttattgggttatttatatatttttttttgttagtttttaaggggttttagtttattgtagttattaaatttttttttgttgtatgtgttataaatattttttgtatatttgttgtttgttttaagtcgttgtttatggggatattttgtttatttttgattggagaaatggggttttaggaagttatttaattgatttttgttttagtttttttatgtgttaaatatggatagtaatagtatttattttatgaagtgattgtgaagataaaattatggattttgtttaagggtttaggttagtgtttggtataggggaagtattttaaaaatatagttgatgttgttaaataatgattgttgttgttgttttattgttattatttttaaagcggtttattttgtttgttgttgttagttatgatttagttttttgattaatttacgtattatttattttattttttgtagagatgttgtttttatttttttaggttcgagggattaggagttatgggattagaggttttgttatttttattgttgttgtttttggtggtaagtggagatgttgatatgaagggatattttgattttggtgaggagattgaattatgggtttttgagggttagggtttgggaggtagagagttgggggttttgatttgttatatgtttgttttttatttagttaagtgtcgttatgttttgggtatgtaggatcggattattttagatagtgatatttttgtttttagtttttggttagattttattgtcgttcgttatagtaggtatttggtatatttggtatatttgtagttgtttcgagaggagtttttgggatttttattttttttttaatttttttgtttatgttagtgaaatttttgtaggttgagggggtaaatgaagtggggtttaaatattggagatggaggtagatttggggttagatgttttttgtgtttttttttatttttaggttggagagtagtgacggggatggggtt

SEQ ID NO: 20 - DNA, 2500 bp, Artificial Sequence
  chemically treated genomic DNA (Homo sapiens)
ggttttattttcgttattgttttttaatttgagggtgaagaggggtatagagaatatttggttttaggtttgtttttatttttagtatttaaattttattttatttgtttttttagtttgtaggggttttattggtatgggtagaggggttggaggggaagtagaggttttaggagtttttttcggggtagttataagtgtgttaggtgtgttaagtatttgttgtggcgggcggtagtggaatttgattaggagttggaagtagagatgttattgtttgggatggttcggttttgtatgtttagggtatagcggtatttggttgagtaaaaagtaggtatgtaataggttaaggtttttaattttttattttttaagttttggtttttagggatttatgatttagtttttttattaggattaaaatgtttttttatgttagtatttttatttgttattaagagtagtagtagtaaagatgatagggtttttggttttatagtttttgatttttcgggtttaagggggtgggggtagtatttttgtaggggataaaatgggtggtgcgtaagttaattaggggattgagttatagttgatagtaatagatagaatgggtcgttttggggataataatagtaaaataataataatagttattgtttaatagtattagttatatttttagaatgttttttttgtgttagatattggtttaaatttttaaatagaatttataattttatttttatagttattttataaggtagatattattattatttatatttaatatatgaagaaattagggtagagattagttaaataattttttaaagttttatttttttaattaggaatgggtaaaatatttttataaataacggtttagaataaataataagtgtgtaaaaaatgtttataatatatataataggaaaaggtttaataattataataaattaaggttttttaggaattgataagaaaaaatatataagtaatttaataaagaaatagttaaagaatgtgaatagttattttatagaaaagtaaagttaaattgttaataaatattttttttaatggttaaatttattagttttagggaaatattaagtagattgataagatatttttttaaggttgtaatatataaaagtggtagaaagtgatgaaaagggaggtattatgtttaatggtagaaatgagtgttattttttatttggaaagtaatttagtaatgtttattataattaaaaatgtatatttttttcgatttagtattttttcgagagagaagtattaggaagtaagaatatatgtgtaggtttgggtttggtggtttatgtttgtaattttagtattttgggaggtcgagatgggaggattatttgaggttaggagttagagattagtttggtgaatatagtgagattttatttttttaaaaaaagtgaaaaataaaaataaaaaagaagattttaaagatgtttattatggtattttttgtaagatataaatttgtaagatatgtgaatgtttataggggataggttggaattaaaaaaaataaggtttattgattattatgtagttatgaaaagtaataaagaggtaatatatttttaattttgtgtgatttttatgtatatttgttgaatatgaaaagtaagtaatagaagtataaaaaatattttattttttgaaaatagaataaataagtatttatgtttgtatatatatttgtgtgtacgtttagaaggagagaatatataatagaatataataatagaatataatataataagagttaatatgaacggggtaaaagaaaagtaaatttaaaaagataggttgattgtattatttttttaaattttgtaatataaatgtatttatgtaaaattataagatatgtaaaagaatatgaaaattattttgatttttaaaaaataaatatgttttaggaaaggttgggtaattttttgttgaggatatgatagaattaaatattagataagtttggattagtttattttgttgtttttttatataggagtttagaattttaagagaagggtagaggggattttagtattttttagttttattgttttttatagttttttaggtttagggtggtttttggattattagtaatatttggaagtatggaagaaattagaattttaggtttatttttgatttgtttaattaaaatttgttttttaatataatttttaggtgatttgtgtttattaaagtttgaaaatttttattttgttttttaggtttaggaagtttattttatataaaattattttaaatggtatttttttataaatttaagtaattattttttttttttttgttgtaggaaaagttattttaatttgtattggttttagagttttgtattgaagtttttaggttttggagttttgagggattcgattgttattttttattaggtttagggtattttgggtttagttat

SEQ ID NO: 21 - DNA, 1299 bp, Artificial Sequence
  chemically treated genomic DNA (Homo sapiens)
tttttagtttgtaatttttgttttttaggggtttaggttggttggtagaggttatagtgacgtggcgggggtatttgataaaattgttgacgatatcgtatgagcggtaggagggttggtagttggtagtttttcggttttagggaatattatatttgagtgaagtggagatatcgaacgttcgggtttagaggtttgttcggttatcgttttttcgggagtttatgtatatgggatataaatttgagtagtatatgtgtgtaggtgagttgtttttgttttatagttttttttttttttttagaggttgagagttcgttacgtttgttgttgtttttttttttgtgtagataaatttggaagttttttagatttttttggggaggttaatattaacgtggttttttgttttgtgttacgtagtcgtttgggaagttattttttgttttttttaggggaggtagattgtatagatttttaagttttatttatatagtttttaatttgttatgtggagtttaagatttttaaggagatgtatagttttggttaatggaggagtttttataggtttaggatcggggtgggtagggcgagagtttaggtttgaaggttgggaaagggatttggggaggagggtgaaggtagaatggagggtgtacgaggggttttattgattttttgttttttttgttagatataagtttttgaaatggtgggtttagttattttttttaggggtttcgaatgttgttgttggttttcgtaatttagacggttttgtttttttttttaagattttttttattatgaagatgtttgaatatgttagggtaagggaacgatgttgtagtttttattcgtatttttaaatattaagattataggtttagtatttagggtaatagtttgttttttttttttttattatttttattgtttattttttgtttttttttttgtttgttttagaatgatcgtgacggttggaatttttttgtgtgtatgaatttttgtgtcgttttttttagttttgtttagagtacggttgtttaggatgattttaggtgaggtatttagttttgttttttttttttggattttaggatttagtttttggtttttaattgatgtttttatttgttttttaggttcgtttatttttttttttgggagtttggcggtttagttatcgtgtttgtatattaagatgtattttacgtttttttgtttatatggtatgtggaagttatgatttaggattttttattattttttaagatttttttttttaaatag

SEQ ID NO: 22 - DNA, 1299 bp, Artificial Sequence
  chemically treated genomic DNA (Homo sapiens)
ttatttgggagagggagttttggggggtgatgggaggttttgagttatagtttttatatattatatgggtaggaaggcgtaaggtgtattttggtgtatagatacggtgattgggtcgttaggtttttaagagaagagatgaacgagtttggggggtagatggaggtattagttgagggttagaggttggattttgggatttagaggggagggatagagttgaatgttttatttggggttattttggataatcgtgttttgggtaaagttaaggaaggcggtatagaagtttatgtatatagagggattttagtcgttacggttattttggagtaggtagaggaggaggtagaagatgggtagtgggggtggtgggaggagagaaggtaggttgttgttttggatgttagatttgtggttttggtgtttggggatacgggtgggagttgtaatatcgtttttttattttgatatatttaaatatttttatggtaggaaaggttttgagggaagagataaaatcgtttgggttacggaagttagtaataatattcgggatttttgggaggaatgattgagtttattattttaggagtttgtgtttgataggaaaagtaagggattagtgggatttttcgtgtattttttattttgtttttatttttttttttaagttttttttttagtttttaagtttaagttttcgttttgtttatttcgattttgaatttgtagaaatttttttattggttagggttgtgtatttttttggaggttttgagttttatatagtaggttgggggttgtgtggatggggtttgggggtttgtgtagtttattttttttgagaagagtagagggtggttttttaggcggttgcgtagtatagagtagaaggttacgttggtgttaatttttttagaggggtttggggagtttttaggtttgtttgtataaggagagaagtagtagtaggcgtggcgggtttttaatttttgggaaggggaagggggttatgaagtaggggtaatttatttgtatatatgtattgtttaaatttgtattttatgtatataagttttcggaggagcggtggtcgagtaagtttttgggttcgagcgttcggtgtttttattttatttaggtatagtgttttttggaatcgggaggttgttagttgttagtttttttgtcgtttatacggtgtcgttagtagttttgttaggtgttttcgttacgttattatggtttttgttagttagtttggatttttgagaggtaggagttataggttgaagg

SEQ ID NO: 23 - DNA, 1945 bp, Artificial Sequence
  chemically treated genomic DNA (Homo sapiens)
ggtttattagtttataaatgaagagttttggttttgaaaggttaaagttaaaattaaattttaaattttcggtattagttaaggattagggaggggtgtgtgtgtgtgtgtgtgtgtgtgtgtgtgtgtgtatatgtttttaatattttattttaatataattttggattgatagaaaagttgtagaaatatttaattttttttaatgttaatattttatataattatagtataattattaaaattataaaataattgatataatattattaattaatttatagattttatttgatttagtaagattttatattgtatttagtttttatgtttttttagttttttttgatttgtgttagttttgtttttttttgttttttatgattttgatatatttgaagagttttgataaattattttatatttggagtttaaaaaattatttttagggttagtgtagttattcgtatttgtaattttagtattttaggaggttaaggtgggaggattatttgagtttaagagttgagattagtttgggtaatatagggagattttgtttttataaaaaataaataaataaataaataaatagattaaaaaattagttgggtgtggtggtatatgtttgtagttttagttatttagggggttgaagagggaggatcgtttgagtttgggagattgaagttataatgagttatgattacgttattatattttagtttggggaataaaatgagattttgttttaaaaataataataataataatttttaggttaggtttggtggtatatatttgtaattttagtattttgggaggttaaggttgaagagttatttgaggttaggagtttgatattagtttgggtagtaaagtgagatttttatttttataaaaaatgtttttaaaaaattagttaggtatagtggtatatatttgtaattttagttttttgagaggttgaggtaggaggattatttgagtttaggagtttgaggttatagggaggtatgattgtattattatattttagtttgagtgagagagtaagattttttttttaaaattaaataaaattatttttagattaaataaaaattacgtgtcggatgtagtggtttacgtttgtaattttagtattttgggaggttaaggcgggtggataatttgaggtcgggagtttaagattagtttgattaatgtggagaaatttcgtttttattaaaaatataaaattagtcgggtgtagtggtgttcgtttgtaatattagttattcgggaatttgaggtaggagaattgtttgaatttaagaggtggaggtcgcggtgagtcgagattatattattgtattttagttgggtaataagagtgaaatttcgttttaaaaaaaaaaaaaaaattatagatatttgaaatattaaaaattattttatagaatgtttttcgatatttatttatttgatatttgttatgatgagattgaggttatgtattttaagtaagaatattgtagaagtgatgttgtattttttttgttgtattatattaggagtttataaggttaatgtattaattttgattatttggttttagggaggtgttttttgagggggttgaaaatttttttgggttttttgaaattatatttgttttgttttagaaggtaagttttgaagttaggagtttaatattttagttttatttttttttttagttttagtgattttgatttattaatatttagtttgcgtcgtagtttattattgtaattaagtggagatagagtcggtgggagacgtgatttatttagtttatagggattgttatttgggagatttgtgtaatagcgtcgtggtaagttatgtggtttttgtaggtattttggttgtagtagttatcgttttgatttgttttttgttaggattgtggagcggatag

SEQ ID NO: 24 - DNA, 1945 bp, Artificial Sequence
  chemically treated genomic DNA (Homo sapiens)
ttattcgttttatagttttggtaagagataggttagggcggtagttgttgtagttaaaatgtttgtaggggttatatggtttgttacggcgttgttgtataggttttttaggtagtagtttttgtgggttggataagttacgttttttatcgattttgtttttatttgattgtaatgatgggttgcgacgtaggttggatgttggtgaattaaggttattggggttgagagagagaatgaaattggggtgttggatttttggttttaggatttgttttttggggtagagtagatgtgattttaaggagtttaaagggatttttagtttttttaaaaaatatttttttgaaattaagtgattaaagttaatgtattgattttgtaaatttttgatgtgatgtagtaagaaggatgtaatattatttttgtagtatttttgtttaaaatgtatgattttaattttattatggtaaatattagataaataaatatcgagggatattttataaaataatttttagtattttaagtatttgtaattttttttttttttttgagacggagttttatttttattgtttagttggagtgtaatggtgtgatttcggtttatcgcgatttttattttttgggtttaagtaatttttttgttttaggttttcgagtagttggtattataggcgggtattattatattcggttaattttgtatttttagtagagacgagatttttttatattgattaggttggttttgaattttcgattttaggttatttattcgttttggttttttaaagtgttgggattataggcgtgagttattgtattcggtacgtaatttttgtttaatttaaaaatgattttatttaattttagagaaaagattttgtttttttatttaggttggagtgtggtggtgtaattatatttttttatagttttaaatttttgggtttaagtaatttttttgttttagttttttaggaaattgagattataggtgtgtgttattatgtttggttaattttttaaaaatattttttgtagagatgggggttttattttgttgtttaggttggtgttaaatttttgattttaggtgattttttagttttggttttttaaagtgttgggattataagtgtgtgttattaagtttagtttaaaaattattattattattatttttgagatagggttttattttgttttttaggttggagtgtagtggcgtgattatggtttattgtagttttaattttttaggtttaagcgattttttttttttagttttttgagtagttaggattataagtatgtgttattatatttaattaattttttaatttgtttgtttgtttgtttgtttgttttttgtagagatagggtttttttatgttgtttaggttggttttaatttttgggtttaagtggtttttttattttggttttttaaagtgttgggattataggtgcgagtgattgtattggttttaaaagtaattttttaaattttaggtataaaataatttattagggttttttaaatgtgttagggttatgaaagataaagaaaaatagaattggtatagattagaggagattaagaagatatgagagttaaatgtaatgtaggattttgttaaattaaataaagtttgtagattagttagtagtattgtattagttattttgtgattttgataattgtgttatggttatgtaagatgttagtattaggagaagttgagtatttttgtaatttttttgttaatttaaaattatgttaaaataaaatattaaaaatatgtatatatatatatatatatatatatatatatatatatttttttttggtttttaattaatgtcgaaaatttgaagtttggttttaattttggttttttagggttagagttttttatttgtgagttaatgggtt

SEQ ID NO: 25 - DNA, 2500 bp, Artificial Sequence
  chemically treated genomic DNA (Homo sapiens)
gggtttgaagtttacgggtaggttgttttttagagaggtgcggagatagtcgagatttttttatcgtttttagtttttttttttatcgttttgtgttgtagcgtagatttcgcgtggttggggtatggggttagttgtgggtaggtttgattcgggggttggtgtggggttgaaatttagtttgggttttgtttagtgatttttgtgtttagggttttatttttttagaggaaggagtgtttttgatttatataaaggcgtttaacgagtttttggggatatttagtgggatttgaggtttatagtggggtagattagatatagttttggtcggggtattgaggtcggggaaggagaggattgagttttatgggtttttttatttgttttgtaggtttatttttatgttatcgtgcgagatgtttacggtcggaagatgagtaagtttttaggtaatgttatcgattttttggatgttatttatggaatttttttgtaggtgggttgggtgttgggttagttaggaagggtcgtggggttgtggttatagttatttgattgtttttattttatttttagggtttttataattagttgttgaatagtaatttggattttagcgaggtggagaaggttaaagaagggtaggtatggagggttgggttgggttaagtaggagtatagcgtggatggggttggttgaggacgtttttttttttgttttttttttgtagaaagttgattttttagcggggatttttgaatgtggtatcgatgtttttcggtttggattatgtgtttatatgttttagggtatggtttttaaagcgttttttttagttatttttttttttttttgtgaggtttattttttttttttattttgagtttttggtgggtatgggttgggaagagggtgatgaggatttatattttattttcgatttaggtcgtgatattaatttggatgtgaatcggatattgggttatcgttatttttgtaataagttttggaatgttattaagtttgtttttcgtggttttgggaagggttttgtgtttttatttattttttaggtaagggtttggtgggtagtaaagttggtagtatttatataggttgtatttttgttcggagtagtttttatgtagttggggggatagatagatatagagatagatagttaaagggaaagtttagcgtattgggggttggggtttgttatttttttttagattttggtatataggtggttgttttggatttattagattttggatgaagatttgtttatgatttttgtttttatggggttttggtatttttttttggttcgtcggttgatatattttttttttttaagttcggaggttatgagagtttggtggatcgttggattcgtagtcgtttgatagaggttgtgaggtttagtaattaaggtttttaggtttacgatttttcggtcgttattattgtttagtatagtttttggttttatgagttttgtgatgtttatttggtgagaaggagtatagcggggtaggggatggtgggggtaggtgggtagtagagttttgggtttagttttgttagagttggttttgagatttaagttaatttattttttttttagtttttataggtatagcgagggtttaaggttagatttttagtcgtgagttttgtatttttcgttttttaggagtgtttgaaatttgtattgaatggggtggattaggtggtagttgagtgtgttcgttagattttgtatatttgtttggacgttggtttgcggttgtttttattttttatgtttttcgtgacggaggagttgttttagaggttgtttcggaggatgtcgtaagttttttttagtttttgtgttattttttattcggagtttttagaggtatggtatggtttggagaggggagtttgatttgttttttaggtttttttatttttttttttattttatagtgtttttggaaggatttcgaggtagaagtcgtttttgagttggcgttaagtattacgcgagtcgtgcgttttttgcgggtcgattataattttattcggattcggtttgattgtgagttttaggtttttatgttcgttttattttattgtttttttagtttattttgggatttagtgttcggtagtgattgtttggttttttgtttttatggagttaggttttatttttttttttttttggtaggttttttggaagtggcggatgaggttacgggcgttttggtatcggcggtgtcgggttacgtgtaggttttggttagcgtaggtgtggtggttgttttggttttgggggttttcgttttttagggttgcgttgtggttttggtttttgatcgttgttttatttatttgtagttttaggggttggtggattttgtacgggagttgggtaagttgtaagttaagcgagttgaggtttagcggtaggtttagcgtttgcgggaacgtcgtgttgtttcg

SEQ ID NO: 26 - DNA, 2500 bp, Artificial Sequence
  chemically treated genomic DNA (Homo sapiens)
cgaggtagtacggcgttttcgtagacgttgggtttgtcgttgggttttaattcgtttggtttgtagtttgtttagttttcgtgtagggtttattagtttttgaagttgtaggtggatggagtagcgattagaagttagagttatagcgtaattttggggggcgggagtttttagggttagaatagttattatatttgcgttggttagggtttgtacgtagttcgatatcgtcgatgttagggcgttcgtggttttattcgttatttttaggaaatttgttagggagggagaaaggtgaggtttagttttatggagataggaaattaagtagttattgtcggatattgggttttagagtaggttgaggggatagtgggatggggcggatatgggggtttgaggtttatagttaggtcggattcgggtgaggttgtagtcggttcgtagggagcgtacggttcgcgtgatgtttagcgttagtttaagggcggtttttgtttcggggtttttttaggagtattgtggggtggaggagggggtgagggggtttggagggtaggttagatttttttttttaggttatgttatatttttgagggtttcgggtagggggtaatatagaggttagggggagtttgcggtatttttcggggtagtttttggaatagttttttcgttacgaagggtatgaagggtgagagtagtcgtaggttaacgtttaggtaagtgtatagggtttggcgggtatatttagttgttatttggtttattttatttagtataggttttaggtatttttaggggacgagaggtatagggtttacggttggaggtttagttttgagttttcgttgtgtttgtgaggattgggaaggggatgggttggtttaggttttaaggttaattttggtaaaattgagtttagggttttgttgtttatttgtttttattattttttgtttcgttgtgtttttttttattaagtagatattatagagtttatagagttagaagttgtattgggtagtggtgacggtcgggaagtcgtaggtttggaagttttgattgttgagttttatagtttttgttaggcggttgcggatttagcggtttattaggtttttatggttttcgggtttggggagagagggtgtattagtcggcgggttaggggagggtgttagaattttatgggggtaggagttatgggtaaatttttatttagagtttgatgagtttaaagtaattatttatgtgttaggatttgggaagaagtgataggttttagtttttaatgcgttgggttttttttttaattgtttgtttttgtgtttatttgtttttttagttatatggaggttgtttcggataggggtatagtttgtgtgagtgttgttagttttgttgtttattaggtttttatttgggaggtgggtgagggtataaaattttttttaaggttacgaagggtaaatttggtggtattttagagtttgttgtagaagtggcggtaatttagtattcggtttatatttaggttgatgttacgatttgggtcgggggtgagatgtgagtttttattattttttttttagtttatgtttattagaggtttagggtggagaagagggatgggttttatagaaggaggaaggagtggttgggagggacgttttgggggttatattttgggatatgtaggtatataatttaaatcggagagtatcggtgttatatttaggaattttcgttgggaagttagttttttatagggaagaggtagggggaggagcgtttttagttagttttatttacgttgtgtttttgtttagtttagtttaattttttatatttgtttttttttggttttttttatttcgttgggatttaggttgttgtttagtagttggttgtggaggttttgagggtggagtgggagtagttaggtggttgtgattatagttttacggttttttttggttggtttagtatttagtttatttgtagggagattttatagatgatatttaggggatcgatgatattgtttagagatttgtttatttttcggtcgtgagtatttcgtacgatggtatggaggtagatttgtagagtaggtggggaggtttatgagatttagtttttttttttttcggttttagtgtttcgattaggattgtgtttggtttattttattgtgaattttaggttttattgagtgtttttaagagttcgttgagcgtttttatgtgaattagaagtatttttttttttgggaagatgaagttttgggtataggaattattgagtagggtttaggttggattttaattttatattagttttcgggttaggtttgtttatagttaattttatgttttagttacgcggggtttgcgttgtagtataggacggtaggagaggaggttgggggcgatgggagggtttcggttgttttcgtatttttttaaagggtagtttgttcgtgagttttaggttt

SEQ ID NO: 27 - DNA, 2402 bp, Artificial Sequence
  chemically treated genomic DNA (Homo sapiens)
ttaggattttttattttttacggacgggttaggtcgtttatagttttcgggttcgagatttatttcgaagtcgcgggatttcgagatttttgtttcgggagaggtttaggcgtttttattcggttttatttttagtttaggttaaaaattttttcgggttggtcggggttgggcggggttcgggggattgggttgatcgcggggtcggggttaggtttttatattatttagataatgtatggttgcgacgtggggtcggacgggcgtttttttcgcgggtatcggtaggacgtttacgacggtaaggattatatcgttttgaacgaggatttgcgtttttggatcgcggcggatatggcggtttagattattaagcgtaagtgggaggcggtttatgaggcggagtagttgagagtttatttggatggtacgtgcgtggagtggtttcgtagatatttggagaacgggaaggagacgttgtagcgtacgggtattaggggttacggggcgtttttttgatcgtttgtagatttttcgggttggttttttataaggaggggagataattgggattaatattagaatattattttttttttggttttgagggagaggaatttttttgggttttagattttgtattagagagtgattttgaggtttcgttttgttttttgatataattaagggataaaatttttgaaggagtgacgggaagacgatttttcgaatattgatgagtggttttttttgatatcggtagtagttttgggttcgtgatttttttttttaggttttgttttttgttttatatttaatgtgtgtgggggtttgagtttagtatttttgagttttttagtttttatttaggttaggattagaagtcgttgttttttttttagggaatagaagattattttaggtgtttgtgtttaggttggtgtttgggttttgtgtttttttttttatttcgggtgttttgtttatttttaagatggttatatgcgtgttggtggagtgttttatgatagatgtaaaatgtttgaattttttgatttttttcgttagatttttttaagatatatatgatttattattttatttttgattatgaggttattttgaggtgttgggttttgggtttttattttgcggagattatattgatttggtagcgggatggggaggattagatttaggatacggagttcgtggagattaggtttgtaggggatggaattttttagaagtgggcggttgtggtggtgttttttggagaggagtagagatatatttgttatgtgtagtatgagggtttgtttaagttttttattttgagatggggtaaggagggagatgggggtgttatgttttttagggaaagtaggagtttttttggagatttttagtagggttagggttttttatttttttttttttttttagagttgtttttttagtttattatttttatcgtgggtattattgttggtttggttttttttggagttgtgattattggagttgtggtcgttgtcgtgatgtggaggaggaagagtttaggtggagaaggggtgaagggtggggtttgagattttttgttttattgagggttttaagttttagttagaaatgtgttttgttttattattgggaagtatcgtttataattatgggtttatttagtttgggttttgtgtgttagtatttatttttttgtaaagtatttgttaaaatgaaggatagatttattattttgattacggcggtgatgggatttgattttagtagttataagttataggggaaggtttttgaggatagattttaggagggttattggtttaggatttatatttgttttttttatgttttttgatttcgttttgggtttgtagttatatatttttggaaatttttttggggtttaagattaggaggtttttttaggattttaaggttttggtttttttttggtattttataggatattttttttttatagatagaaaaggagggagttatatttaggttgtaagtaagtatgaaggaggttgatgtttgaggtttttgggatattgtgtttgggagtttatgggggagtttatttattttataattttttttttagttatattttttgtgggatttgattaggttttgtttttgttttattttaggtagtgatagtgtttagggttttgatgtgttttttatagtttgtaaaggtgagagtttggaggatttaatgtgtgttgggtgttgggcggaatagtggatatagttgtgttatggggtttttttgtattggatgtattgagtatgcgatgggttgtttaaggtgtgattttttattgtgatggatatgaatttgtttatgaatatttttttttatagtgtga

SEQ ID NO: 28 - DNA, 2402 bp, Artificial Sequence
  chemically treated genomic DNA (Homo sapiens)
ttatattatagaaaaaaatatttatgaataaatttatatttattatagtgaggggttatattttaaatagtttatcgtatgtttaatatatttaatgtaaagaaattttatagtatagttgtgtttattgtttcgtttaatatttaatatatattaggttttttaagtttttatttttataagttgtgagggatatattagagttttgggtattgttattgtttggggtagaataaaaatagaatttggttagattttatagaagatgtggttagaggaggaattgtgaggtgggtgggtttttttatgggtttttaaatataatattttaaggattttaggtattagttttttttatatttatttgtagtttgagtgtaattttttttttttttatttgtgagaagaaaatgttttgtgagatattagaaaggagttagggttttaaggttttagaggaattttttagttttggattttagagaagtttttagaaatgtgtgattgtagatttagggcgggattaggaaatatgaagaaagtaggtgtgggttttggattaatagtttttttgaggtttgtttttagggatttttttttgtgatttgtgattgttgggattaggttttattatcgtcgtaattaaggtgataaatttgttttttattttaataggtgttttataaaagagtaagtgttggtatatagggtttagattgggtaggtttatgattgtggacggtgttttttagtaatgagatagggtatatttttagttggggtttggaatttttagtgagataagaaattttagattttattttttattttttttttatttgagtttttttttttttatattacggtagcgattatagttttagtgattatagttttaaggagaattaggttagtaatgatgtttacgatggggatggtgggttgggaagatagttttgggaaaagaggggaaggtgaggggttttgattttgttaaaggtttttagagaggtttttgttttttttaagagatatgatatttttatttttttttttattttattttagggtgaggggtttgggtagatttttatgttgtatatggtaggtgtatttttgtttttttttagaaggtattattatagtcgtttatttttggaaggttttattttttgtaggtttggtttttacgagtttcgtgttttgggtttggttttttttatttcgttgttaggttagtgtgattttcgtagggtagaagtttagggtttagtattttagggtggttttatggttagagatggggtggtgggttatatgtgttttgggggggtttgacgggaagagttagaaaatttaggtattttgtatttgttatgggatattttattagtacgtatgtggttattttgagaatggataggatattcgggatggggaagagagtatagaatttagatattagtttggatataggtatttgggataattttttattttttgagaagggaatagcgatttttggttttgatttgagtggaggttgagggatttagaagtgttggatttagatttttatatatattgagtgtgaagtagagaataaggtttgagaggaaaagttacgggtttaaggttgttgtcggtgttaaagggaattatttattagtattcgagggatcgttttttcgttatttttttagagattttattttttaattgtgttagagagtagggcggaattttagagttattttttggtataggatttggaatttaggaggattttttttttttaggattagagggagggtgatattttagtgttggttttaattgttttttttttttgtgggaggttagttcgggagatttataggcgattagggaggcgtttcgtggtttttggtattcgtgcgttgtagcgtttttttttcgttttttaggtatttgcggagttattttacgtacgtgttatttaggtaggtttttaattgtttcgttttatgggtcgttttttatttgcgtttggtgatttgagtcgttatgttcgtcgcggtttaagagcgtaggttttcgtttagggcgatgtaatttttgtcgtcgtaggcgttttgtcggtattcgcggaggaagcgttcgttcgattttacgtcgtagttatatattatttggatggtgtgagaatttggtttcgatttcgcggttagtttagtttttcgagtttcgtttagtttcgattaattcggggggatttttggtttaaattgaaaatgaaatcgggtaaaggcgtttgggtttttttcggggtaagggtttcggggtttcgcggtttcggggtggatttcggattcggagattgtgggcgatttggttcgttcgtgggggatgaggggttttga

SEQ ID NO: 29 - DNA, 2500 bp, Artificial Sequence
  chemically treated genomic DNA (Homo sapiens)
tttttaaggattttagttttgaaggaggtggtatttttttagtagattggaattgattatgatagtgttttttataaggtaatgagtagatttatagattttagtttagggatgatggtagtttttgatttttagatagtaatttttttttaaaatgtatatttttaggatttttttttttttttttttttgtattttttgtttttttaatatttttgtaattaattttttatattaaatttttttagtttgaagtatataaagtagttaaatgtttttgattggattttggataattggtatgaggtttggggtttgagtttatgtatgtttttgtttttgttttattttttattttttttgtatagtttatttgggtgattttatttatggtttttgtttcgatatttgtgttgatgatttttaaattagggtttttagattatatttggggtttatatttatacgttttattgcgtttttatgtagttttagttggttgttttattggtattttaaatttaatatgtataagattaggttttttttttttgtaaatttgtttttatggtatttttttttgttttaatttagtttatttttgattatttatttagttatttatgttggaaatttgagatatttttgatttttttatttttttatttttatagttaattagtagttaaattttttagattttattttttaattattttgatattttattttttttgttttttttaattatgatttaatttaggtttttattatttgttatttaaattattgttgtattgttataggagtggtgtgtatatgtgtaattgtttattttggtatgttatagatttttgtttagtagttttgttttaattttttaaaagttttagtttattgtttgaaatattaattagaatattttttttaaaatgttaaaatgattgttattttttagttttaatatttttattatttgttaagtaaaagtaagtttttttttgtggcgtagtagggtttacgtgatttggtttttgttcgaatttgtagtttattataatatttttttattttttattattttttattatataggaatatttaagcgatttttataatatttatattaattagtatatagggtttttaaagaggatttttggatgtttgtgatttttgtatttttgtttattttttgttttggcgtgtttttttttttttttatgttttgttggttaaattgttttttttttaagttttaggagtttgtttgattatgttttttttatttcgtatttttataaaattattgcgatttttaaaatatttggtatatttttatttgaatatattatattgttgtgtaattattttttggtttttttttttagtattagattttaagttttttgaaggtagattatgtttatttatttttgtatttttagttttgggtttaatatttagaattttttgtatttttaatatatgtttgttaaatgaattagagttaatgtttgaaggagaataagtttttttgagaaagaggaagagttaggagggaggagaaggtagggttcgaagagttttgggggtttatttggggaagatgcggttttttattgtagtattttgttaggaggtggtattgttttgaagagttagttggtcgtttatagattgaggttgatagtttgaaattaaagagggaattttattaggaagtaatatttttttattgggttttttagtttagttatatgttatattttgttttggttaaatagttaagtttttaggaggttattggttttaggcgtttttttagtgattgatgatgttaaattttacgtttttttgattggtttagataaaatgataagggtatttattggaaatgatttggtaaaatatgatttaaggttattttttcggggagggagttggggaagttgggttggttgggttggtagtttttatttattgtgtggtaagaaggtatgggttatgaatagaattaaggagttgcgttgttatagatgttattatttttgtggttgttattttatttttgggtcgtttttgaaggtaagatggtatttttatttatttttattttgaatttagggagtttatttagttttgtgaggaaaagcgttgtgttttgtgagtggtgggaagttttatgaggtagtggaaataataggggagtggggaaagatagttgttatgtgtggttggtaaacgatattagtgatgttttgtatgttttatttaagataattttttgaagcggagattgttttttttattttataaatgaagaaaatgagatttagagttatttgtgtaagtttatattattggaaagtggtagagttgggatttgaataaagtgaatgttatttttatttttttatttaagattttattttgttttttattattaatttattttgtgatttttgaaaagtgttttagtttttttttttgtagagga

SEQ ID NO: 30 - DNA, 2500 bp, Artificial Sequence
  chemically treated genomic DNA (Homo sapiens)
ttttttatagagaaggaaattaagatattttttaagaattataagataagttaatgatagaaagtagagtagaattttgagtggaggagtgaaaataatatttattttgtttaaattttagttttattattttttaatggtgtgaatttgtataaataattttgagttttattttttttatttgtaaaatggagagaataattttcgttttaagagattgttttaaatggaatatgtaaagtattattgatatcgtttattaattatatatagtagttgtttttttttatttttttgttgtttttattgttttataagattttttattatttataaagtatagcgtttttttttataaagttgagtgggttttttaggtttaggatggaagtaaataggagtattattttatttttagggacggtttaggagtggggtagtagttatagaagtggtaatatttgtagtagcgtagttttttggttttgtttatgatttatatttttttgttatatagtaggtaggagttattaatttagttaatttagtttttttaatttttttttcgagagggtggttttagattatgttttgttagattatttttaataggtgtttttgttattttgtttaaattaattagagaagcgtagggtttaatattattagttattggggagacgtttggggttagtaattttttgaagatttggttgtttgattagggtagagtatggtatgtaattgggttgggaagtttagtggaggaatgttgttttttggtggagttttttttttggttttaagttgttagttttagtttgtaagcgattagttggttttttagagtagtgttattttttggtagaatgttgtaatggggaatcgtattttttttaagtaaatttttagggtttttcggattttgttttttttttttttttggtttttttttttttttaaaaaaatttatttttttttaggtattagttttaatttatttggtagatatatattgaaaatataagaaattttgggtgttgggtttagggttagaaatataaagatgaataggtatagtttgtttttaaagagtttagagtttagtgttgggggagggggttaagggataattatataataatgtaatgtatttaaataagaatgtgttaagtgttttggaagtcgtagtaattttatgaggatgcggaataggaggaatataattaggtaggtttttaagatttgaaggaaaaataatttggttagtagaatatgaaggaagagaaaaatacgttagggtaaagggtaggtagaagtataaagattataggtatttagaggttttttttggagattttgtgtattagttgatatgaatgttgtgaaggtcgtttgggtgtttttgtataataggaggtaatggggggtagaaggatgttgtgataagttataaattcgggtaagggttagattacgtgggttttgttacgttataaggaggagtttgtttttatttagtagatgatagagatattaaaattggggaatgataattattttagtattttggaaaaaatgttttgattgatattttaaataatgaattggagtttttaaagaattgaggtaaaattgttgggtaagagtttatagtatattaagatgaatagttgtatatatatatattatttttgtagtaatatagtaataatttaaatgatagataataagagtttgaattaagttataattagaggaggtagaggagatagaatattaagataattaggaagtagaatttaaagggtttggttattgattagttgtgggagtgggaaggtggaggagttaaagatattttagatttttagtatgggtggttgggtgggtggttagggatggattgaattgaagtagaaaagaatgttatgggagtaggtttatagagagaaagagtttgattttgtatatgttgaatttgaaatgttagtggaatagttagttgaaattgtatgggagcgtagtgaggcgtgtgggtatggattttaggtatggtttgaagattttgatttgagagttattagtataaatgtcgaagtagaggttatgaataagattatttaagtaaattgtgtagaaggagtgggaagtgaaataaggataaaagtatgtatgggtttaaattttaaattttatattagttatttaggatttagttaggagtatttaattattttatgtgttttagattgaaagaatttaatatagagaattggttataaaggtgttaaaagggtaagaagtataaaaaaaaaaaaaaaggagagttttagaaatgtatattttaaaaaaagattgttatttggaaattagaagttgttattatttttgagttggaatttgtaaatttatttattgttttgtgagagatattgttatagttagttttaatttattagaaaggtgttattttttttaaggttagaatttttgagaa

SEQ ID NO: 31 - DNA, 2500 bp, Artificial Sequence
  chemically treated genomic DNA (Homo sapiens)
aataattttaatatataggatattatttttagaaataggatgtgaaggattatgatatagtggttgagtttgagggatatataatttggtttaatttatagtgtattatttattagttttgtatttttgtaaaagttgttttatttttattgttttattttttttatttgtaagtatgaaaagggtatttattttagtgagttgatgtgagaatgaaataaaaatatgaagtataaaaagtatttagtgtaattttgagtataaagtaaaatgtttatttttacggtagtatgatgagaattttgtttttggaaatattaaggtttataaggaatgagtgtttatgtggtagtatgtgaattaatgtagaacgttataagtatagttgtattttgaagtttattttgaattttagatgttatatttatattaataaaaagtataataattatttaaatgtatataatatgtttaatattatatggttatattaattgatgtaatttatagttttttttagtgtttttttttttgaatatttaaaaatgtattagttagtaaagtcgttttatatttttttttatgataaaataagagaaatataatagtaaagtgttatagttttaattaaatgaggaaattataatgggaattaggaatgagggattgaatattttttatataaaatatttattattttaaaatagaattgtgattaggtatgatggtttacgttagtaattttagtagtttggggttatattgttggtgtagaatacgaagttaggagatcgagattattttggttaatacggtgaaattttatttttattaaaaatataaaaaattagttaagcgtggaggtacgtgtttgtagttagagttattcgggaggttgtggtaggagaattgtttgaatcgaggaggcggaggttgtagtgagttaagattatgttattgtattttagttagggtaatagagtaaggttttgttttaaaaaagaagaagaaaaaaaagagttgttttgtgaacggttgattttgagagtttttgatcgattttttagatttacgaatatttggattgtatatttgattttattatattgttagggtaagtgtcgtataaaggtatttttagattttttattgtatataggtggtttttgttagtttatttttgtgtgtgttttggaggtgtcgttaaatttgggggtagtattaggagatacgtttgaaaaagatatttttatttagattaaattattaatagatttttaattttttttaatttattaaagatattattatttggaaataggtatatattatattttttagttaatagttgttattttgttatattattagatatttggggttgtcgttttttgaggtatttagagaattatagaattttttagtattgaaagatttgaaagatcgtagtgtttttattttaattgtgagatatgaagtaatttttttaaatttgtgatattaagatatggtataataaagataagattaaaggatttcggatttataattatgtttttttcgttttttttatttttaaatatatttatatatttatttttgtaaatagttgttttgttaagtgggaaatgaatgtttttataaggtttaaatttgtgaatatattattgattagtatagagttggtttataatagttttttaattaaagtgttttatatgtaattggtttaaattttttaagtattaaattaaaataattttttaaagaatgaaattattttagaagaggatttttatatagtatttttgagtagtaattgatgatgttgttgaatttagatgttgattggtttttcgatacgagattatttaatttaggagtaaggaaattagtaattttttttttataatttggaatgtgggtggaggggggttatagttttttttgagtgagatttgtttgtttttttggtttttggttttgtttttttttttagtatggtgtgtttgaagttttttggaggttttagtttggtagcgttgatagtgatattgatggtgttgagttttcgattggttttcgttggggatattcgacgtaagagtatattgagggtgttgagttattatggggtgggggaatatagggagttgtgttaatattgtgtttaggttatgttttttaagaaattgtgaggttttttttagagattgtttatttttattaagggatcgtaaattattttttttataaaaggaatttggttatttgttttttttatgagatttgtgtaaggggtttttgtataggttatttttttttaaatttttattaataaaatttttgtattatatgtatttagggtttttagaggatttggaaataaggatgttaaaataaattttttatatagtaattttttttattatgttgatttatgttagataaaaggaggtttttattgaaaattttgtgggagttaagggaatttaaaggg

SEQ ID NO: 32 - DNA, 2500 bp, Artificial Sequence
  chemically treated genomic DNA (Homo sapiens)
ttttttgaatttttttgatttttataaaatttttagtaaaaatttttttttgtttgatataagttaatataataaagggaattgttgtatggggaatttattttagtatttttatttttaaattttttaaagattttgagtatatgtgatgtaaaggttttattggtggagatttgagaagaaatggtttgtataaaggttttttatataagttttatggagagggtaagtagttaagttttttttgtggaggaaataatttgcgattttttgataaagatgagtaatttttgaagaaaattttataattttttaagggatatggtttgggtataatgttaatataattttttatatttttttattttatagtagtttagtatttttaatgtgtttttacgtcgggtgtttttagcgaaagttagtcgggagtttagtattattagtgttattgttaacgttgttaagttggagtttttagggagttttagatatattatgttggagaagaggataggattaggggttagaggagtaggtaagttttatttagggagaattatgatttttttttatttatattttaaattatagggaggaagttattgatttttttgtttttggattgggtaatttcgtgtcggagaattaattagtatttgagtttaatagtattattagttgttgtttagagatgttgtatgaaggtttttttttgaaataattttattttttaaaggattgttttaatttagtatttgaaaggtttgaattagttgtatgtaaaatattttaattggggagttattgtgagttagttttgtgttggttagtgatgtgtttataagtttgagttttgtaagagtatttattttttatttgataagataattgtttgtagaagtgagtgtgtgagtgtgtttaagagtaaaggagacggagggaatatggttgtaaattcggagttttttaattttgtttttattgtattatattttaatgttatagatttgggaaaattattttatgttttatagttgaaatgaaggtattgcgattttttaggttttttaatattggaaaattttgtgattttttagatgttttaaggagcggtagttttaggtatttgataatatgatagaatgatagttattgattagagagtgtaatatgtatttatttttaggtagtgatgtttttaataagttaaaggaaattgaaagtttgttaataatttaatttgagtaaaaatattttttttaagcgtgttttttgatgttgtttttaggtttagcggtatttttagaatatatataggaatgggttaataggggttatttatgtgtaatggagggtttgaaggtgtttttgtacggtatttattttaataatgtgataaggttaagtgtgtaatttaggtattcgtgggtttgagagatcgattaaagatttttaaagttagtcgtttatagaataattttttttttttttttttttttttgagatagagttttgttttgttgttttggttggagtgtagtggtatgattttggtttattgtaattttcgttttttcggtttaaataatttttttgttatagtttttcgagtaattttgattataggtacgtgtttttacgtttggttaattttttgtatttttagtggagatggggttttatcgtgttagttaggatggtttcgattttttgatttcgtgttttatattagtagtgtaattttaaattgttggggttattggcgtgagttattatgtttggttataattttgttttaaaataatgaatattttatatgaagagtgtttagttttttatttttggtttttattatgatttttttatttgattgaggttatagtattttattattatgttttttttgttttattataagggaggatataagacgattttgttaattaatatatttttgaatgtttaggaaagagaatattagggaaaattatgaattatattagttgatgtaattatataatattaaatatattatatatatttagataattattatgttttttattaatataaatgtaatatttaagatttagaatggattttaaagtataattatatttatagcgttttgtattaatttatatgttattatataggtatttattttttataggttttagtgtttttaggggtaggatttttattatgttgtcgtaaaaatgagtattttattttatatttagaattgtattaagtgttttttatattttatatttttattttatttttatattaatttattaaaataaatattttttttatgtttataggtagagagaataaaataatggagatgaaataatttttgtaaagatataaagttagtaaatggtatattatagattgaattaaattatatattttttaggtttagttattatattataattttttatattttatttttgagaataatgttttatgtattaaaattatt

SEQ ID NO: 33 - DNA, 2500 bp, Artificial Sequence
  chemically treated genomic DNA (Homo sapiens)
cgttcgtttcggttttttaaagtgttgggattataggcgtgagttatcgcgttcgatttttcgtttttttttagtttttttcgggatcgcgtattattcgtattttttggtttttttttgtatttgtttttttcgtttttttttcgtttttttttatttttcggataaattagtttttttgaggtttttgggttttcgggttgtttttgtgaatggtattggaaggtcgttttagcgcggtcgttgaggtagttatttttttcggtgttgggggcggattttaggtttttgaagttttgttttttttcggagtcgatgtgtttttagtttttgggtcgtagtttttggagttggggttttttttttttgggattcggaggtggtgttttttgttattgtgaggattgtggggggttttgatttttaagttgaggggttggagtttgtaggtttcgggtagaggattttttttgcgatttttgttatttttagtttatttttttttcgttttcggtttcgggggtttttttttttttcgtattttatttttattaatgattaatgatttaaggatattagatttttttttattttttttttgtttattttacggcgttttgggtttttttgtttttttagttttttgttatttttttttgtgtgttgttttttgatttatttttagagtgttttttgtttttatttttcgttttcgttattgaaggttttttttgttttttttatgggttttttttgtaagtagtttttatttcgtgttgtttttatgtttttttatttttaaatgtttttgattttaattttttggtgttgttttttgttcgggggggttttttttttattttatttttttttagatttttaaggagagttttgatgttaatggtagttgggttttaggtagggcgtagggtagcgtagatgtttttttttttttagtgtaggtgtttgttttgggttttgttttattgtggttttttttttatttttttatttttagttttatttttttgaggattttattttttagtttataggtgttggattatttttttttggttttttcgtttttttttattttgggattttgtgttgtttttattttttgtttagttgtttggggtttttagtaagtttttattttttagtgggaaagtgggagtgttggagtatatgatagtgttgagaattttttttaagttttatttttttttagagtattttttttttttgtttttattttattttaagtttttttatagttatttttgttttatgtttatgtcgttttttagtttttgttttgtttattttttttttttaatttagatttaaaataggttgttgggttagttgttttttgattttttttttttttttttggttttttgattttagtgggtttttattttttatatcgtatatttaaaatttgttttgtttgtttttggggtgttattgttttttttttagtattattttttttggtaggtttttttttaggttgagaatttttttttttattttggttttttttttttggttagtatttttattttttgttttgtttttaatttttaatttttgtttgggtacgtagtagatatgtatgtatatatttatggggtatatgggatattttgatataggtttataatatgttataattatattagggtaaatgggttatttattataataagtatttattttttttttgtgttataaataattttattatgtttttttagttatttttaaatgtataataaattattgttggttgtatttattttgttgtgttatttattagattttatttattttaattatatttttgtatttattaattattcgtatttttttattttttattattttttttagtttttggtaatcgttattttattgtttttttttatgaggtttattgttttaatttttggttgttataaataagtgagaatatgcgaagtttgtttttttgggtttggggtttattttattttatatgatgatttttagttttttgtaaatgatatggtggttgaatagtattttatatatacgtgtgtattatattttttttttttattcgtttgttgatggatatttaggtcgtttgtagattttggttattttgaatagtgttgtaataaatatggaaaagtagatagttttttaatatatcgatttttttttttttgggtatatgtttaatagtgggagtgttggagtatatgatagttttattatatttttagtttttggaagaatttttatattattttttatagtggttatattagtttacgtttttattaatagtgtataagggtttttttttgttatattttcgttaggattttttattgtttgttttttggataaaagttagtttatttggggtgggatgatatttcgtaggagttttgatttgtttttatttgatgacgaatgatgttgagtattttttgatata

SEQ ID NO: 34 - DNA, 2500 bp, Artificial Sequence
  chemically treated genomic DNA (Homo sapiens)
tatattaaaaggtgtttaatattattcgttattagatgaaggtaaattaaaatttttacgagatattattttattttagataaattggtttttatttagaagataggtaataaggaattttggcgaggatgtagtaaaagagaatttttgtatattgttggtgggaacgtaaattagtataattattgtgggaaataatgtggaggtttttttaaaaattaaaaatataatagagttgttatatgttttagtatttttattgttaggtatatatttaaaagaaaggaaatcggtatattaaagagttatttatttttttatgtttattgtagtattatttaaaatagttaagatttgtaagcgatttaagtgtttattaatagacgaatggagaaagaaaatgtggtgtatacgtgtatgtggagtattatttagttattatgttatttgtaaagaattggaggttattatgtgaagtgaaataagttttaggtttagagagataaatttcgtatgtttttatttatttgtggtagttaaaaattaaaataatggattttatggggagagataatagaatgacgattattagaggttgagaagggtagtggggagtgggggagtgcggatggttaatgggtataaaaatatagttagaatgaataagatttagtagatagtatagtagggtgagtatagttaataataatttattgtatatttaaaaataattgaaagagtataatgggattgtttgtagtataaagaaaggataaatgtttgttgtgatagataatttatttattttgatgtgattatgatatattgtaggtttgtgttaaaatattttatgtattttataaatatatatatatatatttattacgtatttaaataaaagttaaaaattaaaaataaagtaaggagtgggggtgttggttagagagagaaaattaaggtagagggggagatttttagtttgaggaaggatttgttaaaaggagtaatgttggagggggagtagtggtattttaagagtaggtaaaatagattttagatatgcggtgtggggagtgagagtttattggggttaaggaattaaaagaaaagaaggaaggttaaggaatagttggtttaatagtttgttttaggtttgggttggggaggggagatgggtagagtaagaattggagggcggtatgagtatggggtaggagtgattgtgggagaatttggggtagggtgaggataggaggggagggtgttttgggggagggtggggtttgggaaagatttttagtattgttatatgttttagtatttttatttttttattgaaagatgagaatttgttgagggttttaggtagttgggtaagagataggagtagtataaggttttaaggtggagaggggcggagggattagggagggatggtttagtatttgtgggttggagggtggggtttttaagagggtgaggttgaggatgaaggagtggggaaggggttataatgaggtagggtttagagtaggtatttgtattggaggggagggggtatttgcgttgttttgcgttttgtttaaggtttaattgttattagtattagggttttttttaggggtttggaggggagtgggatggagggaagattttttcggataaaaggtagtattagaaagttagagttagggatatttgggaatggggaggtataggggtagtacggagtgaaggttgtttgtaggaaaggtttataaaggaggtaggagggatttttagtggcgggggcgggggatgaaggtagaggatattttagaaatggattagagaatagtatataggaaggggtagtagggagttgggagagtaaaaggatttagggcgtcgtaagatgggtagggaggaggtgagagggaatttggtgtttttagattattggttattagtaggggtgggatgcgagagaggagaggattttcggagtcggaggcgaggggagaatgagttggggatgatagaagtcgtaggaagaattttttgttcggagtttgtagattttaattttttagtttgagagttaggattttttatagtttttatagtagtaagaagtattattttcgggttttaagaaaggagggttttaattttaggagttgcggtttaggagttgagaatatatcggtttcgggagaggataggattttagggatttgagattcgtttttagtatcgggggaagtggttgttttagcggtcgcgttggaacggttttttaatgttatttataggagtagttcgggaatttaggggttttagaaggattggtttgttcgaaaagtgagaggagacggaggagaggcgaggagagtaagtgtaggaggagattagaaaatgcgggtgatgcgcgatttcgaggaggattgaaaggagacgggaggtcgggcgcggtggtttacgtttgtaattttagtattttgggaggtcgaggcgggcg

SEQ ID NO: 35 - DNA, 2500 bp, Artificial Sequence
  chemically treated genomic DNA (Homo sapiens)
ttagggttggtttttaggagtttttgggaagttagtaaatggaaatttggggaggagggattggggagttagtgggtggggagggtaagtagggtcgggggagatgtgaagagtgttatttttttgttttaggatggagaggtgtattgtatagatgttcgttattatggtaatattagtcgttttattaattatttgtgtgattttaatattattttcgttcgggtttttatgttgtattaagatttgcgatttttacgtatcgttttttttagttttcgagatattcggattggggaggagttagggtgagattttaggggtttttaggggttttgttagggggtgggagatgtagtaaatttgggatttgaaggttggtatgtatttggtgtttaggtatggagtagtgtagagttttttagattttagtgtatataagtattttttggaggatttggggaaatagttttgtgttttttagagagattttgaattagtaggtttgggatggggtttaggattttgtatttttaataagtttttaggtaatgttgatgttgaaagtttatagaatatataaggggtttagattttatttggagaagataggttgggtgtcgggttttttttagggagtaggatttatagggttttcggggtgggtttttggtggttgggtttaggttttataagtttttgtttttttttgataggtttgattatggcgatcgtttttgggatattaaaagtaaatattttatttgttaatgtggttttgagaagtgtaagtatttagtcgaagttattgttttggagtagagtcgtttggttcgtttggatttatattttgagttgttgttcgagttcggttttttgttttttgttaatatatgagaacggattatattttttttttttagtatggatggttatagtttagtcgttttttttgttattagttgttcgtagtttatgtttgggggtgttgttattttttttttttattatttttttatatatttttgattagagattttagttaggttttggaggtttgatagttttttttttttagagttggtttttttttgggagggtaattttagggttggttatttttcgtgttttttatttttagttgaagtttgatgaattgaagtcgggtttttatgttaattggttttttttgtttttaataaatgttgggtttggtaataaattgcgatttttgtgttggggtggggagaaagtatatttggttagagggaatgtgggtttaagggttagaataggatgggaagtaggttggataggtgtggttggtgtgatggtcgtttagtgcggggtagggaggtggggggttattatgaagatttagttttataggtacggtggttgatatttataattttagtattttgggaggttaaggtaggcgaattatttgagattaggagtttaagattagtttggttaatttggtgaaattttattttttaaaatagaaaaaatttgttgggcgtggtggtaggtatttgtaattttggttattttagaggttgaggtaggagaatcgtttgaagttaggaggcggaggttgtagtgagttaagattgagttattgtatattagtttgggtaataagagcgaaattttattttaaaaaggaaaaaataggtttaatttttatattttaatttttggcgggagcgtgttgggagtgtacggtagttaaggtagtttgcgagattataaagcgtttttttattagagtatgttaggtcgtttattgtggttcgtagtgtttttaggaaatagttttgagttttcgttttaggttttagttttttagttcgttgggtataaagttgagaagaaggaattagagtgtgtcggggattataggcgggggtggggttgtgacgtgtgggagggcggggcgggtagtaggtgagacgttaggtttttagggttttaattatttcggagattgagttatggggggaaagtagcgggacgaggatgacgaggtttacggtgagattggggcgaggttcgggattttgtggagggaggggaggacgggtattttgggaatggtgtttggggttggttttagggagaggaattaaggagagtattgtgtttttgaggggagggttcgggaatcgggagttatggagggagggagttagggttttgggaggaggatggggttcgggggttggggttgttgttggggagtttatggggagtgaagttgggtgtttttgaagagttggggttgaggtttttgggaggaggggggtattttaggtttggattttgggtttttaagggtagggttttaggaaataaagtcgagatggaaggtggtaggttggggttttgagtagaatagggttggatgttgggagtgttttgtgttgtagagtttgtaattagtgaggttagggtttttgtaaggaggaggaggtttagtttggagtttgggttt

SEQ ID NO: 36 - DNA, 2500 bp, Artificial Sequence
  chemically treated genomic DNA (Homo sapiens)
agatttagattttaggttgaatttttttttttttatagggattttggttttattggttgtaggttttgtagtataggatatttttagtatttagttttattttgtttagggttttaatttgttattttttatttcggttttgttttttagggttttgtttttagggatttagagtttaggtttgaaatatttttttttttttaaggattttagttttaattttttagaggtatttagttttattttttatgggttttttagtaatagttttagttttcgggttttattttttttttaggattttgattttttttttttatggttttcggttttcgggttttttttttagggatatagtattttttttagtttttttttttggagttagttttagatattatttttaaagtattcgtttttttttttttttatagggtttcgggtttcgttttagttttatcgtaggtttcgttattttcgtttcgttgttttttttttatggtttagttttcggagtgattggagttttggagatttggcgttttatttgttgttcgtttcgtttttttatacgttatagttttattttcgtttgtggttttcgatatattttagttttttttttttaattttgtgtttagcgggttggggagttggagtttgggacgggggtttagggttattttttgggggtattacggattatagtgaacgatttggtatgttttgataagaaaacgttttataatttcgtaaattattttaattgtcgtatatttttaatacgttttcgttaaagattaaagtgtggaaattggatttgtttttttttttttgagatggagtttcgtttttgttgtttaggttggtgtgtagtgatttaattttggtttattgtaattttcgttttttggttttaagcggtttttttgttttagtttttggagtagttaggattataggtgtttgttattacgtttagtaaattttttttattttgaaagatggggttttattaagttggttaggttggttttgaatttttgattttaggtgattcgtttgttttggttttttaaagtgttgggattataggtgttagttatcgtgtttgtgaaattggatttttatagtggttttttatttttttgtttcgtattgggcggttattatattagttatatttgtttagtttgttttttattttattttggtttttggatttatattttttttagttaagtatgttttttttttattttaatataaaaatcgtagtttattattaaatttaatatttattgagaataaaaggaattagttggtatagaggttcgattttaatttattaaattttaattgaggatggggaatacggggggtggttagttttgaagttgtttttttagggaggaattagttttgggagggaggggttgttagatttttagggtttggttgggatttttggttaggaatgtgtgaaagggtggtggggagagaagatggtagtatttttaggtatgggttgcgagtagttggtggtagaggaggcggttgagttgtggttatttatgttggggagagagggtgtggttcgtttttatgtgttgatagggggtagggagtcgagttcgggtagtagtttagggtgtgggtttaggcgggttagacggttttgttttagggtaatggtttcggttgagtgtttgtattttttagagttatattggtaggtgaaatatttgtttttgatgttttagaagcggtcgttatagttaaatttgttagaggaaaataggagtttgtgggatttggatttagttattaagagtttatttcgaagattttgtggattttgttttttgagagggattcgatatttaatttattttttttagatgggatttgagttttttgtatgttttatggatttttagtattagtattgtttggggatttgttagaaatgtagaattttgggttttattttaagtttattgatttaaaatttttttgggaggtataggattgtttttttaagttttttaggaaatatttatgtatattgaaatttgagaagttttgtattattttatgtttggatattaggtatatgttagtttttaggttttaggtttgttgtattttttattttttggtagagtttttagagatttttagagttttattttagtttttttttagttcggatgtttcgggaattgaagaaggcgatgcgtggaaatcgtaggttttggtgtagtatgaagattcggacgggaatgatgttggggttatataggtggttgatgaagcggttgatgttgttatagtaacgggtatttatgtagtatatttttttattttggggtagggggatggtattttttatatttttttcgattttgtttgttttttttatttattgattttttagttttttttttttaggtttttatttgttgattttttagaggtttttgaaagttagttttgg

SEQ ID NO: 37 - DNA, 2500 bp, Artificial Sequence
  chemically treated genomic DNA (Homo sapiens)
ttttagtttttgtttttttttttttgaaatttattaagttatttttttttttttatttatttttagatttttttttttatttttttagattattttttaaagttcgtagtttttaatttgttgtttgtattttttttgtgtttttttgaagttgaggagtttttttatgttttgggagttgatttttttttaagaattttttattttatttttaatttattttatttttaattcgtttttttttttcgtagattgatttttttttttttttgtttttaggttttttgttttgtttttttagttttttaatttttttttttttttatttttattttttttaaggaaatacgttttaaattgttatcgaatgaagtttgttttttttagcgttttgtgtgaaattaaggagaaaattggtatgtgggtttttttcggattgtttaattttgggaatagaattttgtttattatagggttagagtgtgataatttggggttttgaggaaagtaaggagttagggggattggggaaggaattaaagtttgggaatttggttttttaggaagtattaggaggattgagtattgggtattggggtttttgggtttttaagtttattcgtttgtatgttaggttttagtattcggagtttttaggaggaggagtcggtggatttatagttgatgcgtttggataatatgtttttggtagagggtgtggttgggttcgagaaagggggcggtttagtagtagtagttgtagtcgttgtagtttttggtggtggtgtgttttttgataattttatcgaatattcggattatcgtagtaaatttgtttagattcgttatatatattattcggagttggagaagtatgagtaggtaaggagaggaggtttgggtgggtggagggaagggtttttgtaggggaattttatggttaaagggtttttttttattagtttattggtttttattataggtatgtaatgagtttacgatttatgttatgaatttgttgagggagtagagtcgtattaggttcgtggtttttaaagagatggaacgtatggtgagtattatttatcgaaagtttagcgttatttagatgtagttgaagtagagtatttgcgaggttgtgatgattttgcgttttcgttttttggatgttaggtgggtttagggattttaggttggtttttagtattgggtttttttttatttttttttaagattttgagttgttatgttgtataatatggtattttatgataatggtgattttggggttatgttatgtgatagttttgttaggatattaatattttttttatcgttttttttttttttttgtagacgaaagcgtcgtaattttagtaaataggttattgaggttttaaatgagtatttttatttttatttgagtaatttatattttagtgaggaggttaaggaggagtttgttaagaagtgtggtattatcgtgttttaggtattatggaggttgcgggaggagttgttaggtaaagtgtacgtattttagttaggtgtagtggtgtgtttttgtaattttagttattagggaggttgaagtgggaggattatttgaattggagattagtttgggtaatagtatagtgagattaggaagtaaaaaaaaaaaaaatgttgttatttatattttatttagtgaaggattttagaggtaaatgtttttatttgatttttttttttgttttataggtttttaattggtttggtaataagaggattcgttataagaaaaatatcggaaagttttaagaggaggtaaatatttatgttgttaagatcgtcgtgttagttatttaggggggttatagtcgtattagtttttcgatattttttttttttgtaggtggattttattgttattttagttgattgttttgtatattttttgtttttgtttttattttttatttaggtaggattatagtagagagggggttttttggggtgagagggatcgagttgagataggttggagatgttaggggatagaggttattttagtgattttagttttgtttttttttttacgggtggttaaggaatagtttgttttttttgtgtgttggaatgttattttgtggataattggagtatagtagtatgtttttataagagttgagagttgtggtttattttttattattacgggttttattatatttttttttttttgtttttataaggttttggcggtttttttaattttttaggatttggagatatgtttttggggatgtttgggtttaacggagatttttattttgttttttaggttagatgtttattttttttcgaatagggttttttttaattttattttttttattttaggatataagattttttttttttgaggtttttttttattgttatatttttttttgttgtttgtaggtggaattatttcgatattcgatggggttagggggttatggggataatttcg

SEQ ID NO: 38 - DNA, 2500 bp, Artificial Sequence
  chemically treated genomic DNA (Homo sapiens)
cgaggttatttttatagttttttggttttatcgagtgtcggagtgattttatttgtaggtagtagaggaaggtatgatagtgaagagaagttttagaggaaagaggttttgtattttaaagtagaggaaatggagttggggaaagttttattcgagaggagatgggtatttgatttgggaagtagaataggaattttcgttgagtttaggtatttttagaaatatgtttttagattttgagagattgaaagagtcgttagagttttgtgggggtagagagggaagagtgtaatagagttcgtgatggtagaggatgaattataatttttaatttttgtggggatatgttattatattttaattatttataaaataatattttaatatatagaaagagtaggttgttttttggttattcgtgggaagaaaggtagaattaagattattggaatggtttttgttttttgatatttttagtttattttagttcggttttttttattttaaaaggttttttttttgttatgattttgtttagataggaagtgggaataaaagtaggaagtgtgtaaaatagttagttggggtgatagtgggatttatttgtagaggaagggggtgtcggggagttggtgcggttgtggtttttttgggtgattgatacggcggttttgatagtatagatgtttgtttttttttggaatttttcgatgttttttttatagcgaatttttttgttgttaaattagttggagatttgtggggtagaaaggagggttaggtagaaatatttgtttttgaagttttttattgaataagatgtgagtgatagtattttttttttttttgttttttggttttattatgttgttgtttaggttggtttttaatttaagtgatttttttattttagtttttttagtagttgggattataggaatatattattgtatttagttgagatgcgtgtattttgtttgataatttttttcgtaatttttataatatttgagatacggtgatgttatattttttggtaagtttttttttggtttttttattaggatatgggttatttaggtgggagtagaaatatttatttaggattttagtggtttgtttgttgaagttacggcgttttcgtttatagaggagggagaagagcggtgaggaggatgttgatgttttggtagggttgttatatggtatgattttagagttattattgttatggagtattatgttgtgtagtatggtagtttagggttttggagaggaatgggaaggagtttagtgttgggggttagtttggggtttttgggtttatttggtatttaggaaacgggagcgtaggattattatagtttcgtaggtgttttgttttagttgtatttggatggcgttgaattttcgatggatgatgtttattatgcgttttatttttttgggggttacgggtttggtgcggttttgtttttttagtaggtttatgatatgggtcgtgaatttattatatgtttgtagtgggggttagtgggttggtgaggaggagttttttgattatgggatttttttgtaagagtttttttttttatttatttaagttttttttttttatttgtttatatttttttagtttcgagtggtatatgtgacggatttgggtaagtttgttgcgatagttcgagtgttcgatggagttgttaggggatatattattattagaggttgtagcggttgtagttgttgttgttgagtcgttttttttttcgggtttagttatattttttgttagaagtatgttgtttaagcgtattagttgtgggtttatcggtttttttttttgggagtttcgaatgttgaggtttagtatgtaggcgagtggatttagggatttagagattttaatatttagtgtttagtttttttggtgttttttggagagttaagtttttaggttttggttttttttttagtttttttgattttttattttttttagggttttaagttgttatattttagttttataatgaatagggttttgtttttagagttgagtaattcggggggggtttatatattagttttttttttgattttatataggacgttaaagagagtaggttttattcggtggtagtttagggcgtgtttttttgggaggagtgggagtggggaaagagaaaagttgaggagttagagaaatagagtagggggtttgagaataaggagggaggagggttagtttgcggagggaggaagcggattgggggtggaatgagttgggggtggaatgaggagtttttgggaaaagattagtttttagagtatggggaagttttttagttttagggagatatagggaagatgtaggtagtaggttaaaggttgcgggttttgggagatggtttagaaaggtaggaggaggaatttgggagtggatggagaaaggaaagtgatttggtaggttttagagggagagagatagaagttgggg

SEQ ID NO: 39 - DNA, 2500 bp, Artificial Sequence
  chemically treated genomic DNA (Homo sapiens)
gttatagaaatattgggtatacgtgaagcgaggtggtaattgtttagcgttaatatttttggttttttaagatttagatttggaggaggaagaggaggaggaagatttggtgttgatttgtgaggatgatgaagatgaagaattagggggtagttttagggttttagtggggggagggtttgaggttatttttagtataagtgatgttcgtattttgagtgagtttttagataagggggaggagtaggttaatttttgtgagttttttaatgattttggtttatatgagggtgggggttttgtggtaggttttgatgatttaggggggttaattttttttttttatgtttttttttatttttttcgatcgtttttttttttggatatgtagggtaattagattttggttttttcgtcgtcgtttttatttttatttttataggtttttggttaattattagggaattaagtagaatacggggtagtgatcgtggggggtacgtcggtggggagtttgggtgtgtcgggtagcgttggtggggtttttggagggattggtagtggggacgggaataagatttttttgtgttattgtgggaaggtttttttttataagagtatgcgggatcggtacgtgaatatgtattttaatttgcggtcgtttgattgtttcgtgtgtaataaaaagtttaagatgaagtattatttgattgagtatatgaagacgtatataggttttaagttttacgagtgcggagtttgcgttaagaagtttatgtggcgagatagttttatgcgttatcgaggatattgtgagcgtcggtatcgtttgggcggggtcggggtcgtatttgggtttgggatttttacggggttatttttgtcgtttaagagagagtttttcggagtgggcgggggtagcggcgacgaagcgagtgcggttacgttttcgtttagtagacgtgtttggtttttatttagagtttataaggtggagatgggtttcggtggaggtggaggagtaaattgaaggggtaggttattggggtggggtagttttcgggaaagggaataaggagtacgatgtaagggcgttgtggttttcgggtgattttttattatatttattgtttttttttatttttgtggatttgtatatattttggaaggggaattatagttttattatcgttcgtttattttattatttaattttttttttttaaggtatttttagaattaaattttttttttttttttgatgggtatattgaagtttttgttttatagagtagattgtatatggagggagggagagggggcgtgttgaatattttgtagttatagggttaggggttaggtggttgtagtttgtgtttgaagtttgtgtttgtgttgtcgtggagataaggtttttgagttttatttttgttttagaatttatttttttttaaggatgcgttttttatttttattttgttttttttcgttattttcgatttttcgtggaaatttttaattcggtttttatggaggagtgggtggagataaggagggagtaagtcgtaggagtataaggtttttattttttttaatagtgattaaaatatttattggttatttatttggtttttcgataattcgtgtgtttgttggggacgcggtatagatagggggaagtcggagtaatggttttcgggtaagtggatgttggagagtatatataggagttggggggcgggggagggtttggggttggggagggttcgaattcggggttgttgggtagtttaggagggcgcggtaaggttggggtgttttggtgagaattggagaggatttattcgggtttttgtttggttagtggggaaatatcggttttttaggtatttttatttaattagagcggggatttttatcgttttttatgtcgttttttggaggaaagtgaaagtgaaaggaggaagaggaggttttatggttgaggaggtcgtagcgttatgaagtttttgtttttgtttttcgttgtggttttgggtgagcgaatttcgcgatttatcgtttaagaattagagggaagcggagggaggtggttttattggagtcgatgttagggtgggagtggggtaggttattagatatataaatcgttttttattcgcgtttttatacgttaggtttggcgatcgtcgttttagtaggattcgcggtgatcgagtgttggttcgtggaggatgcgagcggaaagggtttggttaagagattcggtgtattgttgttgcgttagggatcgggggaatcgtcgtttcggtcggatttcgattttgagttttattttagtgtatacggtgagtttttagggattcgtcgtttttttatttttgtcgtttttatcgaaatttttttttttttagattcggtagtgattttaggttttagttttttttttgtaaagtgagttttattacggggtagtttgtgtatttgaagtttttcgaat

SEQ ID NO: 40 - DNA, 2500 bp, Artificial Sequence
  chemically treated genomic DNA (Homo sapiens)
gttcggggaattttaaatgtatagattatttcgtagtgagatttattttataaaggggaagttgaggtttgaggttattgtcggatttaaagaggagggggtttcggtggaggcgatagaggtaggggggcggcgagtttttagagatttatcgtgtatattgagatagagtttagggtcgaggttcggtcggggcggcggttttttcggtttttggcgtaatagtagtgtatcgggttttttggttaggtttttttcgttcgtattttttacgaattaatattcgattatcgcgggttttgttgagacggcggtcgttaggtttggcgtatagggacgcgagtgaggagcggtttgtatgtttggtgatttgttttatttttattttggtatcggttttagtggggttattttttttcgtttttttttagtttttgggcgatgagtcgcggggttcgtttatttaaagttatagcgaggagtagagatagggattttatggcgttgcgatttttttagttatgaagttttttttttttttttttatttttatttttttttaaagggcggtatgaggggcggtggaaattttcgttttggttaggtgaaggtgtttgggggatcggtgtttttttattggttaggtagggattcgggtagattttttttagtttttattaggatattttagttttatcgcgtttttttggattatttagtagtttcgagttcgagttttttttaattttaggttttttttcgttttttaatttttgtgtgtgttttttaatatttatttgttcgaaaattattatttcggtttttttttatttgtgtcgcgtttttagtaaatatacgggttatcgggaagttaagtaaatgattaataaatattttaattattgttaaaaaaaataaaaattttgtatttttacgatttattttttttttgtttttatttatttttttatgagaatcgagttgggaatttttacgggaagtcgggggtggcggggagagatagggtagaaataaagagcgtatttttgagagggggtaggttttaggataagggtggggtttaaaggttttgtttttacgataatataaatatagattttaggtatagattataattatttgatttttgattttgtgattgtaggatgtttaatacgttttttttttttttttttatgtgtaatttattttgtggagtaggggttttagtgtatttattagagggaaaggaagggtttagttttggaaatattttgggggggaggggttgagtagtagaatgggcgggcgatggtgaaattgtggttttttttttagaatatatataagtttatagagataaaggaagatagtaagtgtggtgggagattattcgggggttatagcgtttttgtatcgtgttttttattttttttttcgaaagttattttattttagtagtttgtttttttagtttgtttttttatttttatcgaagtttatttttattttgtggattttgggtggggattagatacgtttgttggacgggggcgtggtcgtattcgtttcgtcgtcgttgttttcgtttatttcgggagatttttttttggacggtaaggatggtttcgtgggagttttaggtttaggtacggtttcgatttcgtttaggcggtgtcggcgtttatagtgttttcggtggcgtatgaagttgtttcgttatatgaattttttggcgtagatttcgtattcgtagggtttgagatttgtgtgcgtttttatgtgtttagttagatggtgttttattttgaattttttgttgtatacggggtagttaaacggtcgtagattgaggtgtatgtttacgtgtcggtttcgtatgtttttgtgggagaaggtttttttataatggtatagaaagattttattttcgtttttattgttagtttttttagggattttattaacgttattcggtatatttaggttttttatcgacgtgttttttacggttattgtttcgtgttttgtttggttttttggtggttggttaggagtttgtgaggatgaggatgaagacgacgacgggaagattaggatttggttgttttgtatgtttaagggaaggagcggtcgaggagggtgggagggggtataggaagagggagttggtttttttgagttattaagatttgttataggatttttatttttatatgggttaaagttattggaggatttatagaagttgatttgttttttttttttgtttgggggtttatttagggtacggatattatttatgttgagggtagttttaggttttttttttattggaattttggagttattttttagttttttatttttattatttttataggttaatattagattttttttttttttttttttttttagatttgggttttggggaattaggggtgttggcgttgggtaattattatttcgttttacgtatatttagtgtttttgtggt

SEQ ID NO: 41 - DNA, 2500 bp, Artificial Sequence
  chemically treated genomic DNA (Homo sapiens)
ttttattttgtttttattttgattattttaggggtcgttattattttttttttggttattttaatagtttaagttttttttgattaagttatcggagtttttaaagaaggaattttaggtattttaggggattatatttttttgaattatttttgatgtttgtttggttgaggattttaagtttgtttaggaatttttagtttaaagttgttggtttgttttattagttaggtggggtttagatttatatatagaggaagagtaggtatatggaggagtttgggggatgattagaggtagggaggggattatttatgaaggtaaaaaaattaaattatttatttatggaggatggagagaggggaataatagaagaatatttaaggagaaatagagataggtttaagagatgaagagtgagagggtatgcgtataaggttgattaagagagaaagaagtaggtatgagggattatagggttttagaaggtagggaaaggttttgaaagttagttgtcgattagagttttatacggaggtatttgtattttcgatgaagtttaataaattttttttttttgaaatgttgtttgtttgtgtgtgtgtgtttgggagtgagaattttttagtttatttaaggaatggagggagggatagagggtttaaagggagtaagagttgtggggagaataaaaggataagggtttagagagttttagggatatgtgatggatttattaggtgaggtcgttagattgttgtaggggaagtaaaggagaagttgagaagatgaaggaaaagttagggtttggaggggcgggggttagggagtttttgggagatatggttatatgtagcggttttgaggaatgggttataggagatttttggggagatgtgattatagtaatgggtaggagaatgtttagggttatggaagtcgagtatggggatttttttttaacgaagatagggttatgtagagggttttagggagtgaaagagtttttaggatttttaggtatggaatataggggacgtttaagaagatatggttatatattggggttttgagaagtgagagttttatgaaaaaaattagggattttagagttttttggaagttaagattgaaattagtattatgagttttcgggttagaatgaaagaagaaggtttgttttagtggggtttgtgaattttcgggggtgattttatttttcggggttgttttaggtttgtttttgttatttttatttagttttttttgaggttttaagtttgttattaagtttttagtttttttttttcgtagggatttaaatataggttttaggatttaatatagtttttttttttaatttcgtttttttttttttaaggatttagttttttgaagttttttttagttttagttttattttttttttgtattttgtttggaagttagaaggaaatagattatagatttggtttttaaaagaaatggaggtaataggttttgaggggtatggggacggggtttagtttttagggttttatatataaattagttagtggtttagaagatttttttcggaatcggagtagggaggatggggagtgtgaggggtatttttgatgtttgtgtgtttttaattttttaaattttcgttttcgcgatggagaagaaatcgagatagaaggtgtagggtttattatcgttttttttagatgagtttatgggtttttttattaaggaagtttttcgttggttgaatgatttttttttcgtttttttttcgttttagggatatataaaggtagttgttggtatatttagttagtagacgtttttttagtaaggatagtagaggattagttaagagggagagaagtaattatagattttttttgaaaataatttttagacgttatattttttgataagttgttaggtaggtttttttttttttatatattgatttacggttttatttttttttttttggaaaggatattatgagtattgaaagtatgattcgggacgtggagttggtcgaggaggcgttttttaagaagataggggggttttagggttttaggcggtgtttgttttttagtttttttttttttttgatcgtggtaggcgttattacgtttttttgtttgttgtattttggagtgatcggtttttagagggaagaggtgagtgtttggttagtttttatttatttttttatttaaggggaaatggagacgtaagagagggagagagatgggatgggtgaaagatgtgcgttgatagggagggatggagagaaaaaaacgtggagaaagacggggatgtagaaagagatgtggtaagagatggggaagagagagagagaaagatggagagataggatgtttggtatatggaaggtgtttattaagtgtgtatggagtgaatgaatgaatgaatgaatgaataagtagatatataaataagatatggagatagatgtggggtgtgagaagag

SEQ ID NO: 42 - DNA, 2500 bp, Artificial Sequence
  chemically treated genomic DNA (Homo sapiens)
ttttttttatattttatatttgtttttatattttatttatatatttgtttgtttatttatttatttatttatttattttatatatatttagtgagtattttttatgtgttagatattttgtttttttattttttttttttttttttttttattttttgttatatttttttttgtattttcgtttttttttacgtttttttttttttatttttttttattagcgtatattttttatttattttattttttttttttttttgcgtttttatttttttttgggtgggagagtggatgaaggttggttaggtatttattttttttttttgggggtcgattattttaaagtgtagtaggtagaagagcgtggtggcgtttgttacgattaggaaggagaagaggttgaggaataagtatcgtttggagttttggggtttttttgtttttttggggagcgttttttcggttagttttacgtttcggattatgtttttagtgtttatggtgttttttttaggggagagagggtggagtcgtgggttagtatgtgagaggaagagaatttgtttggtagtttgttaggggatgtggcgtttgagggttgtttttagggggggtttgtagttgttttttttttttttagttggttttttgttgtttttgttgagggagcgtttgttggttgggtgtgttaataattgtttttatatgtttttggggcgagaggagggcggggaaagaattatttaattagcggaaaatttttttggtggagaaatttatgagtttatttggaggaagcggtagtgggttttgtattttttgtttcggttttttttttatcgcgggggcggggatttggaaagttggggatatataagtattaaggatattttttatattttttattttttttgtttcgatttcgaggggggttttttgggttattgattgatttgtgtgtaggattttggaggttgaatttcgtttttatgttttttaaaatttattgtttttattttttttggggattaggtttgtggtttgtttttttttaatttttagataggatgtaggaaaaagatagaattagaattgggaggggttttagaaagttgagtttttgagggagagaaaacggggttggagggaaaagttgtgttgagttttgaggtttgtgtttgggtttttgcggggagaaggagttgggggtttggtggtaggtttgaggttttaggaaaggttgggtgggggtagtagggataagtttgggatagtttcggggagtgaaattattttcgggaatttatagattttattggggtaggttttttttttttattttgattcggagatttataatgttggttttagttttggtttttaaggaattttggggtttttgattttttttatgaagtttttattttttagggttttagtgtgtggttatatttttttaaacgttttttgtattttatatttggaggttttggaggtttttttattttttggggttttttatatggttttgttttcgttaagggggggtttttatattcgatttttatagttttggatatttttttatttattgttgtggttatatttttttagaggttttttgtaatttattttttagagtcgttatatgtggttatattttttaggagttttttgattttcgtttttttagattttgattttttttttatttttttagttttttttttgttttttttgtagtagtttggcggttttatttggtgagtttattatatatttttgaagttttttgagtttttatttttttgttttttttatagtttttgttttttttgagttttttgtttttttttttattttttagatagattgggaagtttttatttttagatatatatatataagtagatagtattttagagaaaagaggtttattgggttttatcgagggtgtagatgttttcgtgtggggttttggtcggtagttggtttttagagtttttttttgttttttggggttttgtgattttttatgtttattttttttttttttggttagttttgtgcgtatgtttttttattttttattttttgggtttgtttttgtttttttttggatgtttttttattatttttttttttttattttttataaataaataatttaatttttttgtttttataaatagttttttttttgtttttagttattttttaagtttttttatgtgtttgttttttttttgtgtgtggatttaggttttatttagttggtgggatagattaatagttttgggttgggaatttttaggtaggtttgaaatttttagttagatagatattagggatggtttagggaggtgtggttttttgggatgtttagaattttttttttgaaagtttcggtgatttgattagggaagatttgagttgttggaatggttaaaggagaggtggtgacgatttttgaaatggttagaatggaggtagaatgggg

SEQ ID NO: 43 - DNA, 2500 bp, Artificial Sequence
  chemically treated genomic DNA (Homo sapiens)
tgggagtagatatggttttatgagatgaggttagtttggttaggggtttgtatataggagtattatataggtttagttttttttttaggagagagattgagatttgtttttttttttttattttaggttagatagatgtgcggattttttgtagtttttatggtgtgtttgatttgagtcgttgtatttgtttttgtgagttaggttggggtgggtttatttgtttagattttatagatgttgagattttttttttttttttatttttagtttcggggttttgtttagatgattgtaatgattagggtcgttgtgttcgtggtcgttgcgtgtgttttttcggttatattggttttagttgtggttggttattttgtttcggggattgttaaggtcgtgggcgttgcgtgtagggcgtgtgtgtgtgtcgggtaggttttttaggtttcgattgtagttagcgtttttgttttcgaggttgtagttagaggggacgttgtgagggtgggcgttgcgtgtgtgatttaggttatattggtgacgattgtggtatgaggagttgttttcgcggttgtagttagagggggcgttgtgagaatgggcgttgcgtgtgtaatttcggttatattggcgaggattgtggggtgaggagttgttttcggggttgtagttagcggggacgttgtaaggacgggcgttgcgtgtgtgatttcggttatattggcgaggattgtggtacgcggagttgtttttgggattgtggcgagggcgggcgttgcgtggacggtcgttgcgtgtgttggttcgggtatataggcgaggattgtagtacgcggatatgttcgagggattgtcggggtcgcgggcgttgcgaggacggcgaatgtatttgcgatacgggttatagcggggacgattgcggcgtgcgtagttgttttggcgattgtaattaaaggggtcgttgcgaggacggtcgttgcgtgtgttggtcggggtatattggaatcgattgcggttcgcgcgtttgtttacgcgattgtagaggtcgcgggcgttgcgagaacggcgtgtgtgtttgtaatgcgggttatagcggcgaggattgcggtgtgcgtagttgttttggggattgtcgtggtcggggtcgttgtgagagtggtcgttgtatgtgttggtcggggtatataggtcgggattgcggtacgcgcgtttgttttggcgattgtcgcgggcgcgggcgttgcgtggatggtcgttgcgtgtgtaattcgggttttatcggtgaggattgtgggagtcgtcgttgtttcggggattgtcgtgggtacggtttttgcgaggatggcgtgtgcgtgtgtgacgtaggttatttaggggaagattgtagtacgcgtagttgtttcgggggttgtcgaggtcgcggttagtgtttagatgggcggtgtgtgtgcgaggacggttattttggcgaggattgcggtgtgaggtagtgttcgaatgattgtagttagtacggcgtgtgttaggacggtgtgtgtatttgttgggaaggttacgtgagtgaggattgtagtattcgtatttgtttttttaattgttacgggaggggtcgttgtgaggaagggcgttgtttgtgcgatttaggttatatcggttttatttgtgttattcgtatgtgttcggttgattgtcggggacgtgggcggtgtgtgtaaggagtgtgtttgtgttacgtgggttatggcggtgaggattgcgggtaggaagagtttttagttagcgtttgttttggaggttgcgggtttcgggaattgtgtcgggtaggttagtgtgtgtgtgtagagggttttcgaggttttgattgtgttatttagatatgtttaggggattgtcgtggtcgaggagagtgttacgatggtagttgtgtttgtaaagatgggtatgttggcgaagattgcggagaaggtgagtaggtagttttttttagtgtattttgggattgtgattttgtgaataggagttatggggaagatttgagtttgaggaagagtggagggagagtatgttattttaaggagttagtgtttattaggggtagtagaattataggggtggggttttttagtgggtaggattggtttttagatttttgaggagtaggttggggtttatttagttgtatttagggagattttgtgtttttgaagatggagagaaggtgaaggcgatttaagtttcgtttagttttttgttagttattttttattagtagagaggagtgggagttaggatgggttttttcgatgtttttgagtaaaaggggttgtgggtgggggtggttgttttgtgttaattagttttttttaatttatttttttgggtagaggtgttaattattgagggtatgaggatgtattttttggaggagataatagttcggatagagtggatttcggtttttggtttcgtggatgtttatgaaatttagtttatttttacg

SEQ ID NO: 44 - DNA, 2500 bp, Artificial Sequence
  chemically treated genomic DNA (Homo sapiens)
cgtggggatgaattgaattttataggtatttacggggttaggagtcggggtttattttgttcgaattgttgttttttttaagagatgtatttttatgtttttaatggttggtatttttgtttaagagaatgggttagggaaagttggttagtataaggtaattatttttatttatagttttttttatttagggatatcgaagaggtttattttaatttttatttttttttgttagtggagaatagttgatagagggttgaacggggtttggatcgtttttattttttttttatttttaggagtatagaatttttttaaatgtaattaaatgggttttaatttgttttttagagatttgaaggttagttttgtttattggaaagttttatttttgtggttttgttgtttttggtgggtattggttttttggaatgatatgttttttttttatttttttttaggtttaggttttttttatggtttttgtttatagaattatagttttagagtatattggggaaggttgtttgtttatttttttcgtagttttcgttagtatatttatttttgtagatatagttgttatcgtgatatttttttcggttacggtagttttttgggtatgtttggatggtatagttagggtttcggaagttttttatatatatatattggtttgttcggtatagttttcggggttcgtagtttttagggtaggcgttggttggaggttttttttgttcgtagtttttatcgttatagtttacgtggtataggtatattttttgtatatatcgtttacgttttcggtagttagtcgggtatatgcgggtggtataggtagggtcggtgtagtttgggtcgtataggtagcgtttttttttatagcggtttttttcgtggtagttggaggggtaggtgcggatgttgtagtttttatttacgtagtttttttaatagatgtatatatcgttttggtatacgtcgtgttggttgtagttattcgggtattgttttatatcgtaattttcgttagagtagtcgttttcgtatatatatcgtttatttaggtattggtcgcggtttcggtagttttcggggtagttgcgcgtgttgtagtttttttttgagtagtttgcgttatatacgtatacgttattttcgtaaaggtcgtgtttacggtagttttcgggatagcgacggtttttatagtttttatcggtgaagttcgggttgtatacgtagcggttatttacgtagcgttcgcgttcgcgatagtcgttaggataggcgcgcgtgtcgtagtttcggtttgtgtatttcggttaatatatgtagcggttatttttatagcggtttcggttacgatagtttttaggatagttgcgtatatcgtagttttcgtcgttgtagttcgtattgtaaatatatacgtcgttttcgtagcgttcgcgatttttatagtcgcgtgggtaggcgcgcgagtcgtaatcggttttagtgtatttcggttagtatacgtagcggtcgttttcgtagcggtttttttggttgtagtcgttagggtagttgcgtacgtcgtagtcgttttcgttgtagttcgtgtcgtaaatgtattcgtcgttttcgtagcgttcgcggtttcggtagtttttcggatatgttcgcgtgttgtagttttcgtttgtgtattcgggttagtatacgtagcggtcgtttacgtagcgttcgttttcgttatagttttaggggtagtttcgcgtattatagttttcgttagtgtagtcggggttatatacgtagcgttcgtttttgtagcgttttcgttggttgtagtttcgagggtagttttttattttatagttttcgttagtgtagtcggggttatatacgtagcgtttatttttatagcgttttttttgattgtaatcgcgagggtagttttttatgttatagtcgttattagtgtagtttgggttatatacgtagcgtttatttttatagcgttttttttggttgtaatttcgagggtaggagcgttggttgtagtcggggtttgagaagtttgttcggtatatatatacgttttgtacgtagcgtttacggttttggtagttttcgggataggatggttagttatagttggggttagtgtagtcgggaaagtatacgtaacgattacggatatagcgattttgattattgtagttatttgggtaggatttcgaggttgagggtggggaagagggagggattttagtatttgtggggtttgagtaggtgggtttattttagtttggtttataggaataggtgtagcggtttagattaaatatattatggagattgtagagggttcgtatatttgtttgatttggagtaggaggggagaggtaagttttagttttttttttgggagagaggttgagtttatgtagtgtttttatgtgtaggtttttagttaggttagttttattttataaggttatgtttgttttta

SEQ ID NO: 45 - DNA, 1405 bp, Artificial Sequence
  chemically treated genomic DNA (Homo sapiens)
tgtttttggtgttggggtgttattcgggagtgggggtattgtggtttttgttattatgggttttgcgcgtttttatgtttttagtcgggttagtgagaattaattttttagtagtagtaattattttagttttagggagtttattgattttttattttttttttaagaggtatttgtagtttttgtagtgggtagtggggagcgtcgaggaggtggttttgtatttttagtttttgtcgttggtagtggaggggttatatttggaaagttgttgttggaggtagatgagttgtgcgatgatggtggggatgggaggggggtagtggtttttggggttgggtttcggagatttatttatatattttttagtattatgttatagaaatattgggtatacgtgaagcgaggtggtaattgtttagcgttaatatttttggttttttaagatttagatttggaggaggaagaggaggaggaagatttggtgttgatttgtgaggatgatgaagatgaagaattagggggtagttttagggttttagtggggggagggtttgaggttatttttagtataagtgatgttcgtattttgagtgagtttttagataagggggaggagtaggttaatttttgtgagttttttaatgattttggtttatatgagggtgggggttttgtggtaggttttgatgatttaggggggttaattttttttttttatgtttttttttatttttttcgatcgtttttttttttggatatgtagggtaattagattttggttttttcgtcgtcgtttttatttttatttttataggtttttggttaattattagggaattaagtagaatacggggtagtgatcgtggggggtacgtcggtggggagtttgggtgtgtcgggtagcgttggtggggtttttggagggattggtagtggggacgggaataagatttttttgtgttattgtgggaaggtttttttttataagagtatgcgggatcggtacgtgaatatgtattttaatttgcggtcgtttgattgtttcgtgtgtaataaaaagtttaagatgaagtattatttgattgagtatatgaagacgtatataggttttaagttttacgagtgcggagtttgcgttaagaagtttatgtggcgagatagttttatgcgttatcgaggatattgtgagcgtcggtatcgtttgggcggggtcggggtcgtatttgggtttgggatttttacggggttatttttgtcgtttaagagagagtttttcggagtgggcgggggtagcggcgacgaagcgagtgcggttacgttttcgtttagtagacgtgtttggtttttatttagagtttataaggtggagatgggtttcggtggaggtggaggagtaaattga

SEQ ID NO: 46 - DNA, 1405 bp, Artificial Sequence
  chemically treated genomic DNA (Homo sapiens)
ttagtttgtttttttatttttatcgaagtttatttttattttgtggattttgggtggggattagatacgtttgttggacgggggcgtggtcgtattcgtttcgtcgtcgttgttttcgtttatttcgggagatttttttttggacggtaaggatggtttcgtgggagttttaggtttaggtacggtttcgatttcgtttaggcggtgtcggcgtttatagtgttttcggtggcgtatgaagttgtttcgttatatgaattttttggcgtagatttcgtattcgtagggtttgagatttgtgtgcgtttttatgtgtttagttagatggtgttttattttgaattttttgttgtatacggggtagttaaacggtcgtagattgaggtgtatgtttacgtgtcggtttcgtatgtttttgtgggagaaggtttttttataatggtatagaaagattttattttcgtttttattgttagtttttttagggattttattaacgttattcggtatatttaggttttttatcgacgtgttttttacggttattgtttcgtgttttgtttggttttttggtggttggttaggagtttgtgaggatgaggatgaagacgacgacgggaagattaggatttggttgttttgtatgtttaagggaaggagcggtcgaggagggtgggagggggtataggaagagggagttggtttttttgagttattaagatttgttataggatttttatttttatatgggttaaagttattggaggatttatagaagttgatttgttttttttttttgtttgggggtttatttagggtacggatattatttatgttgagggtagttttaggttttttttttattggaattttggagttattttttagttttttatttttattatttttataggttaatattagattttttttttttttttttttttttagatttgggttttggggaattaggggtgttggcgttgggtaattattatttcgttttacgtatatttagtgtttttgtggtatgatgttagggggtgtgtaggtgggttttcggagtttagttttaggaattattgttttttttttatttttattattatcgtatagtttatttgtttttagtagtagttttttagatgtggtttttttattgttaacgataggggttgggaatatagggttattttttcgacgttttttattgtttattgtagaagttgtaaatgttttttgggaggaagatgagaaattagtggattttttggggttgaagtagttgttgttgttgggagattgatttttattggttcggttggaggtatgggagcgcgtagagtttatggtagtaggggttatagtgtttttattttcggatggtattttagtattagggata

SEQ ID NO: 47 - DNA, 2500 bp, Artificial Sequence
  chemically treated genomic DNA (Homo sapiens)
gcgtgggttagggaggtttgatatatttttattttttttagatatattttttattgattcgggatcggaggagcgagtttagtcgtaataaattgttgagacgtatagttttcgtgtcggtggaggggcggttttacggcgagtatggtacggcggtcgagtaggtttttatgattcggataggcgcggggagagggttgaagatggatcgggttggcggggcgggggcgtcggggagcggcgggagttggtcgggggcgggagaaggcggagataaagttttgtttttcgaggggagatggcgtttttttttggaaggtggagcgggataggggttgtgggtgagaggtttttgtgggttttcgttcggtttcgtttttttttttttttttagtagtgaagtttgattatttttttggtgtttgtaaaaatagtttttttagatttttagtttttagttcgtgtgtttttgtttttgttttttttagtttttggtttgggattttggaaagaatgatttagtttttgttttttttttagattttttttttatttttatgtttttgatttttttttcggatttttagtttttgaggtttttttttattattttttgttttttttttttattagttgtttttattttttgtaattgtattatttttttttttttttttttgattttttttattttttgtattttttttgattatttcgttttttttttttgttttcggcgaaagtttattagatttttattttattttttttttgtttgtagagttatttgcgcggtttgtttttttaattttttttttttttttatttgtttttttttttttttttttttttttgtttttttaattttttttttagttatttaaaaaaagatttttgtttttttgagaagttcgtttaaaaggtttttatgggaatagtgaggggagatgaaggtagagaatagagatttgtagttaaggtgtagagagacgtttttagttttcggaaattttttcgttattgtttttttttattttattttttttttcggatttagcgatttaggttttttatttttttaatttttaggtgattttttttttttattagttttttttttttttaggaatttaagttattagttttttttttttagagagttagtgatttgtttttattttttggttttttttagttttttgataggtttaggttttattagttttgtgggtcggtttggggattttgggtgggtgggtgggtggttagggatgtgtgttattgttatggaaattttatattatcggggtgtgtgggtagtatatttttgtgaggtaaagttaggtggtggtggagtgtatatagagaatgtgtgtgatgtttgttatatttgtgtgtatatgtatatgtgtgtatgttatgtttatgtttggggaagatgtgtgtgtttgtgtgtatgtgtgtatatttgcgtttttaggttagaatggttatatgtttatagagtatgtttattatgtgttttgtggttggtagatttgtttatttattttttatttttttttttattttgagtttttagggtttaggggtttttggcgggggtttttcgtgtgttttgggtggggatatcgtgtgtgtttggagttgaggtggtatgtggaggttgttgtattggggtttagtaggggttgggaggggttttaggggtatatgtatttggggggagggtttagtgaaagttgatgggggtgaacgtttagggtttttaggtagatatggaatgtgtaaagggtatggaggatgtgtagtggatataggggtcgttgggattttggggatttggtaatgttaaggtgtttgttgaggttgtggattttttagttcgggagaggtcgtcggatttttgaggggtattggaattttgggttttttttttgttgggtggagtcgcgaattttcgtttttttcgcggttttgtgtgtgtgggggggttttgtttaggaggggatggtgggtggtttggtttgttttgggggtttttttgtttttttttttcgtttttttcgcgttgttttcgggcgatagggttcgtgatagaggcggttacggtagtagcggtcgtttagtaacggcggcggggttcgggtaacggcggtagcggcgggagcggcggcggagggagtcgttttcgcggtcgttatcgcgcggtcgtttcggtcgtttcgggtttcgtcgtcgtttttatcgcgtcgggcggcgcgagtcgggtcgtatcgtttttttttttttcgtatttcgtttttttttcgcgtaggggcggggttttttttttatcggggatatttttggttttttcggggggcggtgcgaggtaagggcggggtcgggcggattaggagcgcgcgtagaggggggggcgtcgcgcgcgtggggcgggggcgcgcgtgtgcgtgggcgcggggaggggggtggggaagtcgcggtggcggcggcggcg

SEQ ID NO: 48 - DNA, 2500 bp, Artificial Sequence
  chemically treated genomic DNA (Homo sapiens)
cgtcgtcgtcgttatcgcggtttttttattttttttttcgcgtttacgtatacgcgcgttttcgttttacgcgcgcggcgtttttttttttacgcgcgtttttagttcgttcggtttcgtttttatttcgtatcgtttttcgggggggttaggggtgttttcggtgggggaggggtttcgtttttgcgcgggggaagggcggggtgcggagggagagggggcggtacggttcggttcgcgtcgttcggcgcggtgggggcggcggcggggttcgggacggtcgggacggtcgcgcggtgacggtcgcgggaacggtttttttcgtcgtcgttttcgtcgttgtcgtcgttgttcgggtttcgtcgtcgttgttaggcgatcgttgttgtcgtggtcgtttttgttacgagttttgtcgttcggagatagcgcgagagagacgggggaggggggtaaggggatttttaaaataaattaggttatttattatttttttttgagtaggatttttttatatatataaaatcgcggagagaacgagggttcgcggttttatttagtagaggaggagtttaggattttaatgttttttaaaggttcggcgatttttttcgggttggagagtttatagttttagtaaatattttggtattgttaagtttttaaggttttaacgatttttatgtttattgtatattttttatgttttttatatattttatgtttgtttgaagattttaaacgtttatttttattaatttttattaagttttttttttaaatatatatgtttttggaattttttttagtttttattgaattttaatatagtaatttttatatgttattttaattttaaatatatacggtgtttttatttaaaatatacgggagattttcgttagagatttttagattttgaggatttaggataaggagaaagatggggaataagtgggtagatttgttaattataggatatatgataaatatgttttgtgagtatgtgattattttggtttggaaacgtaggtgtatatatatgtatataaatatatatattttttttagatatgaatatgatatatatatatatatatatatatatagatgtgatagatattatatatattttttgtatatattttattattatttgattttgttttatagagatgtgttatttatatatttcgatggtatggggtttttatgataatgatatatatttttgattatttatttatttatttaaggtttttaaatcggtttataaggttagtagggtttggatttattagaaggttggaaggagttaaaggatggggataggttattggttttttaagggagagaaattggtagtttgaatttttgaagggagggggagttggtgggaaaaaggggttatttgggggttggaggaatggggaatttggatcgttaggttcgggaagggaaatgaagtggaagggggtagtgacgagggggttttcgggggttgagggcgtttttttgtattttggttgtagatttttgttttttgtttttatttttttttattgtttttatggaaattttttaagcgaattttttaggaagataaaaatttttttttaaatgattaaagagggggttgggggggtagaaagggggagggaggggaagagatagatggagagagggagagagttggagagatagatcgcgtagatagttttatagatagaaaggagatgagatgggagtttgatggattttcgtcgggagtagaggggagggacggggtaattaagaggggtatagaaaataagagaaattagggaggaaagagaaagggtgatataattgtagaaaatagaagtagttgatgagaggagaaaatagggggtaataaaaggagattttaaggattgaaggttcggaagaagaattaggagtataggggtggggaagaggtttggggggagggtaggaattaggttattttttttaagattttagattaggggttgggaggggtaggggtaggaatatacggattggaagttaaagatttaaggagattatttttataagtattaggaaaatagttaaattttattgttggagaggagaaagggagcgaagtcgagcgaggatttataggggttttttatttatagtttttgtttcgttttattttttagaggagggcgttattttttttcgggaagtaagattttgttttcgttttttttcgttttcggttagttttcgtcgtttttcgacgttttcgtttcgttagttcggtttatttttagtttttttttcgcgtttgttcgggttatgagagtttgttcggtcgtcgtattatgttcgtcgtggggtcgtttttttatcggtacggagattgtgcgttttagtagtttgttgcgattggattcgttttttcggtttcggattagtagggggtgtatttaggggaggtgggggtgtgttagatttttttggtttacgt

SEQ ID NO: 49 - DNA, 2500 bp, Artificial Sequence
  chemically treated genomic DNA (Homo sapiens)
gttaattgttttttgggaggttaaatttttttttttttttttagtttagaagttgtttagatgaaaagtataattttaatattgttttagttttatagttttaagggatttttgggtttttattttagagtttaggatgatatttttgtggaaaatattgtttgtttggggattgttttttgttgtggttgtaggtttgtttaggaagaggagttgaaaagaggtaagttagggaaatagaaatagcggagtatattgtagtgggaatcgtattgcgtattttttcgagtttttttttttataagttatttatgggaggtagttagtgaatatttagtaattaaggaaatatgagaaataggaaagtttagggtttattatgtaatttaggtttagtgatgtatgaggttagtgtttttatttgtaatagaagtaaaatgattaaaagataatgatttgattttttgttgtttattttttagtgatttggttagggaagaagaagaaaaaagtgagtagtatagttatttttgtttttaaggttgagagttgaggtttattgagatttgttggcgtgaataattttttatgatttttaaaaatgtggtgatttatttgttggtgatttttgtgttgttggtgattttttatgtgttagggaggttgttttgtgtgttttagaaagtgtttttattttaaattttttatgttcgtgaaatatttgtttttttgtttggttgttaatagaatgaaattatattgattaattattagaatggattttttttttttatagtgaatgtgatattggttttaaatatagtttatttgagattgattttttttgaatagaataagcgtgtgatttatggatatttaggtagttagatattttatagagatttgattatttgttttatgggttagagggaatttttgttagggagttggtattgagaggtggagattgggaatagggcgcgatgggtttcggaggttgttaagtatatgttgtaaagaaagagttatttttgtgttatttgatagtgagttttaggtaatggattgtaaaagaaatgagttttgggttatttttttttttttaagttttatttttttgaaggtggtttttgaataagttagaatttttttgatcgtgtttttgaatatttttttttttataatatgattggtaagtgttttatttatattttttttaaaatttttttttttgggattttgtatttcgttttattttttggttttttaatgtaggttttttggatattttttttgtatttataagaatatttttaacgtattaggaaaataataatttgggattttggaaattagaatgatattttgagttttgattattttttatttttttaattgtttgaagggggttgttatgattattgaagtattaatttaaggtgttttaattttatttaggaaaatttgttggagattgatttttttagagatttattttgttttaggttttttgagattcggtttattaattataatttgatatttgataattaaggatttttagaaaattttatgggaaatataatttagtttataggaagaaatgaaaggaataattaaggatttggttagttttttttttttttttttttttttttttttttttttttttttttgagataaagttttattttgttatttaggttggagtgtagtggtatgattttagttgattgtaatttttgtttttcgggtttaagtaatttttttgttttagttttatgagtagttgggattataggtatgtgttattatgtttagtttatttttgtatttttagtagagatggggttttattttgttggttaggttggttttaaatttttggttttaaatgatttattcgtttcggttttttaaagtgttggaattataggtatgagttattatatttggtttgattagtttatttaagatggtgataattaattgtttatataggtggaattgagaaaataaaaaatatatatatatagttaaaaaaaagtgaaagaaaatatagttgtataagggggagaaaaatttgattattaaaatataattttgaaaattttatgaagtgttgtaaaattttttttttagattttttgagaaagttgatataggaaattgagttaggaaaaaaattttagatttttcgatttaagcgaaaaattatgtattatttatacgaatatgttaattttattgttagagtaaaataaagtgtataatttaaaattaataattataaaataaataaatataagtagtatatgtaatatagtaaaaatattttaaagttataatgagtttaagaagataaattatatgtggaagatagaagaatgttaataagatttttggaaagaatgttatgaagtgagaagacgaggatttgttagtgacgttttgttgttttttaggatggtagacgttagaggtatcgcggttttatgcg

SEQ ID NO: 50 - DNA, 2500 bp, Artificial Sequence
  chemically treated genomic DNA (Homo sapiens)
cgtatgggatcgcgatgtttttgacgtttgttattttggagagtagtagagcgttattagtaggttttcgtttttttattttataatattttttttaaaagttttgttgatatttttttgttttttatatatagtttatttttttgaatttattataattttaaaatatttttattgtgttatatgtattgtttatatttgtttattttataattattaattttaaattgtgtattttattttgttttaataataaaattgatatgttcgtatagatgatatataatttttcgtttggatcggaaagtttaaaattttttttttgatttaattttttgtattaatttttttaaaaagtttggaggagggattttataatattttataagatttttaagattatattttagtgattagattttttttttttttatgtagttgtatttttttttatttttttttaattgtatatatatattttttatttttttagttttatttatgtggataattaattgttattattttaaataaattgattaggttaggtgtggtggtttatgtttgtaattttagtattttgggaggtcgaggcgagtggattatttgaggttagaagtttgagattagtttggttaataaagtgaaattttatttttattaaaaatataaaaataggttgggtatggtggtatatgtttgtaattttagttatttatgagattgaggtaagagaattgtttgaattcgggaggtagaggttgtagttagttgagattatgttattgtattttagtttgggtgatagagtgagattttgttttagaaaaaaaaaaaaaaaaagaaaagaaaaaaaaaaaaaaagaaattgattaaatttttgattattttttttatttttttttgtaggttaaattgtattttttatgggattttttaagggtttttgattattagatgttagattgtgattgataggtcggattttagagaatttggaataggataggtttttgaaaagattagtttttagtagatttttttgagtagaattaaaatattttgagttagtattttaatgattatggtagttttttttaagtagttagagaaatgagaaatgattaggatttagaatattattttggtttttagaattttagattgttatttttttgatacgttggagatgtttttgtgggtatagaaaaaatgtttagagaatttatattagggaattaaagaatgaagcggggtgtagagttttagagaaggaagttttggggaaggtgtagatagggtatttgttaattatgttataagaggagaggtatttagaggtacggttagggggattttgatttgtttaggggttatttttaaggggatggggtttggaagagaggggatggtttagaatttattttttttgtaatttattgtttaaaatttattgttaggtgatatagagatgattttttttttgtaatatgtgtttggtaattttcgggatttatcgcgttttgtttttagtttttattttttagtattagttttttgataggagttttttttggtttatagagtagatagttagatttttgtgggatatttggttgtttgaatgtttatggattatacgtttgttttgtttagaagaaattagttttaggtgagttgtgtttgaagttaatgttatatttattgtaaagaaagagaatttattttgataattaattaatataattttattttattaatagttaaataggaagataagtgttttacggatataagaaatttaaagtggaagtattttttagagtatataaaatagtttttttaatatatgagaagttattagtaatatagaaattattaataagtaggttattatatttttaaagattataggaaattgtttacgttaataaattttagtgaattttagtttttagttttgaaaataaggatggttgtattatttattttttttttttttttttttaattagattattggggaatgggtagtaggaaattaaattattattttttaattattttgtttttattataagtggaaatattgattttatgtattattgagtttggattgtatgataagttttgggtttttttgttttttatgtttttttagttattggatatttattgattgttttttataggtgatttgtgaaaagggaggttcggggaagtacgtagtacggtttttattgtagtgtgtttcgttgtttttgtttttttgatttatttttttttagtttttttttttgggtaggtttatagttatagtaagaagtaatttttaaataagtagtgttttttataaaaatgttattttggattttaaaatggaaatttaagaattttttgaaattgtgaaattgggataatattaagattgtattttttatttgagtagtttttaggttggagagaagggagagaatttggttttttaggaagtagttggt

SEQ ID NO: 51 - DNA, 2500 bp, Artificial Sequence
  chemically treated genomic DNA (Homo sapiens)
ttggttaaggtgtatgtggtggtggaaagggattttttagggtgtttgttgtttatttaggggttgtttagagggtagaggggtagaggtttaggtaggttagtgttgtggttaagaatttgggttttggatttagattatttgggtttgaattttaggtatattatgtatttatagtattattttggattaattatttaatttttttgaattttaggttttttattttaaaatggggatgtataagatatgaatacgtaggttttagaaaagaaatttaggaagttagtaagtattcgaaaagttattagtaattagaaatatataaattgaagtatttataagatacgattttatagttattagattggtaaaatttaggaaattagtttatgtcgagtgttgttagagatataggaggttgtagggttttgggaattttttacgggatgtttagttagtttggaatgtacgttggtattatttagataaaataattatattggtcgggtatggtggtttatatttgtaattttagtattttgggaggttgaggtgggtggattataaggttaagagatcgagattattttggttaatatggtgaaattttgtttttattaaaaatataaaaattagttgggtatggtggtaggtgtttgtagttttagttatttgggaggttgaggtaggagaattgtttgaatttaggaggtagagattgtagtgagttaagatagtatcgttgtattttagtttgggtaatagagggagattttattttaaaataaaaataaataaagaaataaataaaaattatattatattttgagtttatattttatttttgggtatatattataaagaaatttttattttggtttgtgagagaatatgtatatttattttttgtttgtggtggtatggtgttggtagtattagggtgttttttattgggagagagggaaggttagtgtgggggatgtatttatagagtgttttgtagtagttggaagtagtgggttagatgtggttataggaatatggataaatgttgaaatattaggtggagaaaaagaagtaaaaaaaaattagatatataattattttttatatgaattataaattataagtttataaaagaagatatgttttataagattatatttatataaaaagatatttgttggatatattggaatgattgtagttagggatgggaatgggatatgaaggtaaaagttaagaaatagaaataagtagttatataagtaaaatgaggaaaataataatatttgttttatagatttgtttggagagtttagtgagattttataagtaataattgggatggtgttttatgtttataaagtaaggtgggtttggttagggttgggggtgtgtgtatgtagagtttttgttgattttttttgtttttttttgttttaggttttgtttgttatagagatttttgttatgggagtaaatatgtttgttcgtatagtagtgtttgattttatgcgtaaatacgatggttttatttttcgggatttgttttttggggagtatgtgtagatggtaggtcgggtagggcggaggggtttggattttataggtatcgttattttgttttgtaagggtcgagtgttcgagatggtagatttgtatcgtatgatgatggtgagcgggttagtatgttcggtagggttttagttttaggattttgttggattttgttttcgattttttttttttttttttttttttttttttttttttggagatagggttttgttttgttatttaggttggagtgtagtggtataatttcgggttatcgtaatttttgttttttaggtttaagggatttttttattttagttttttaagtaggtgggattttaggtatatgttatataggtttggttaattttttttttttttttatgttttgtagagatgaggttttgttatgttgtataggttggttttgaatttttgggtttaagtagtttgtttgttttagttttttaaagtattgggattataggtgtgggttatagcgtttaatttttttcgatttttttgttttgtttgggagaagttgaggtaggagtgagtgaatttaaggatgagattggagtttattttttttagtttttttttatgtgaatatggagttagatggggtttttgagtttatttattttagtttgtttttttatgttatagaagaggtgagtaagtggtttgtttaaggttttatggttgtagagttaggatcggatttgacgggagtaggtttagtttagaagattggttggggtttagtaggttttattttgattttagtgatttttgtgatttgattttaggggaagtcgttttagttgtagttttagtttcgttttacgtatattatgatttttaatttgttgcgagtggatgtttttagggtggaggatatgatgaagaggagtttttttgagtttttttttcg

SEQ ID NO: 52 - DNA, 2500 bp, Artificial Sequence
  chemically treated genomic DNA (Homo sapiens)
cgggagggaaatttagagaagtttttttttattatgttttttattttgagggtatttattcgtagtaagttgaggattatagtgtacgtgaggcggaattgggattgtagttgggacggttttttttggagttaggttatagaagttattgagattagggtgggatttattgaattttagttagttttttggattgggtttattttcgttagattcggttttagttttgtaattatggagttttggataaattatttgtttattttttttgtaatataagggagtaaattgaaataaatggatttaaaggttttatttagttttatatttatatgggagaaaattggaagagatgggttttaattttatttttggatttatttatttttattttagttttttttaggtaaaataaaaaagtcggaggaagttgggcgttgtggtttatatttataattttagtattttgggaagttgaggtagatagattgtttgagtttagaagtttaagattaatttgtgtaatatagtaaaattttatttttataaagtataaaaaaaaaaaaaaaattagttaggtttgtgtggtatgtgtttggaattttatttatttgggaggttgaggtgggaggattttttgagtttggaaggtagaggttgcggtgattcgagattgtgttattgtattttagtttaggtaatagagtaagattttgtttttaaaaaaaaaaggaagaagaaaaagaagagaggagaatcgaagatagaatttagtaaggttttggagttggggttttgtcgagtatgttggttcgtttattattattatgcggtgtaggtttgttatttcgggtattcggtttttgtagagtaggataacggtgtttgtggggtttaggttttttcgttttgttcggtttgttatttgtatatattttttagggagtaggtttcggaaggtggagttatcgtgtttgcgtatggagttaaatattattgtacgagtaggtatgtttatttttatggtaaaggtttttgtggtaaataagatttgggatagaggagaatagaaaggattagtaaaggttttatatatatatatttttagttttggttaagtttattttattttgtaggtataaggtattattttagttgttatttatgggattttattgaattttttaggtaaatttatagggtaggtattattgttttttttattttatttatgtagttatttatttttattttttaatttttatttttatattttatttttatttttgattgtaattattttaatgtatttaataaatatttttttatataaatatgattttatagaatatgtttttttttgtgagtttgtagtttataatttatataaaaagtggttatatatttgatttttttttgtttttttttttttatttagtgttttaatatttgtttatgtttttgtggttatatttaatttattgtttttaattgttgtagaatattttatgggtgtattttttatattaatttttttttttttttagtgaagggtattttggtattattaatattatgttattataaataaaggatgggtgtatatgtttttttatagattagggtgagaatttttttgtgatatatatttaggaatgaaatataagtttagagtatgatatagtttttgtttgtttttttgtttgtttttgttttgagatggagtttttttttgttgtttaggttggagtgtagcggtgttattttggtttattgtaatttttgttttttgggtttaagtaatttttttgttttagttttttaagtagttgggattataggtatttgttattatgtttagttaatttttgtatttttagtagagatagggttttattatgttggttaggatggtttcgattttttgattttgtgatttatttattttagttttttaaagtgttgggattataggtgtgagttattatgttcggttaatatagttattttgtttaaatagtgttagcgtgtattttaaattggttaggtatttcgtaaaggatttttagaattttataattttttatatttttggtaatattcggtatgaattagttttttaaattttattagtttaatagttgtaaagtcgtattttgtgagtattttaatttgtatatttttgattattaataatttttcgaatgtttgttagttttttgggttttttttttgagatttacgtatttatattttatgtatttttattttaagatgggaaatttaaagtttaggaaggttaaataattggtttaggatgatattgtgaatatatggtgtatttgggatttaaatttaggtagtttgaatttagagtttagatttttaattatagtattggtttgtttaaatttttgtttttttgttttttggatagtttttaagtgggtaataagtattttgaggagtttttttttattattatatgtattttgattag

SEQ ID NO: 53 - DNA, 2500 bp, Artificial Sequence
  chemically treated genomic DNA (Homo sapiens)
atttaatatttaataatttttttttaaaattttaatattttgtgtaggttttaaaatgtgtgtgatagattgggtatggtggttagtgtttgtaattttaatattttgggaggtcgaggtaggtggattatttgaggttaggagtttgagattagtttgattaatatgatgaaattttgtttatattaaaaatataaaattagttacgtgtgatggcgtacgtttgtaatttagttatttgggaggatgaggtaggagaatcgtttggattcgggaggtggaggttgtagtgggttgagattacgttattgtattttagtttgggtaattagagtaaaattttgttttaaaaaaataaataaaataaaataaaataaaataaaatatgtgtgatagaagtttggaagttattggtttaagtttttcgttagaattttgttttgtaattgtgttttttataatattttatgtaatattatagatggtttttttttttagttatattttaaagagggtagtttttgtgtttttttgggatttaaaattaagtaatttattgtattgcgaggcggtaatatatattagttggagtagtgattgagaattatgtgatatatttagattttatttttattttttttttatggtgtgatgggggaagggggataaggtaatatattttaatttttttatttataaaataggggttattatgttttttatagggtggagtgaagagagtttgttaaagagaaagatgtttaataaaggttttttttttagttgttgttgttttttatttttattattattattattattatttttgagatagagtttttgttatttaggttggagtatagtggtgcgattttagtttattgtaaattttgttttttgggtttaagtgatttttttgttttagttttttgagtagttgggattataggtgtttgttattatattaggttaatttttgtatttttagtagagatgggttttgttatgttggttaggttggtttcgaatttttgattttaggtgatttatttgtttaaagtgttgggatttaggtatgagttatcgcgtttagtttttagtttttttttaatagttattttttagtgttttttttggtttttgtttttgtcggttttattttagtttttttgttttttttagggttttttgtttgtttttttattattttttttttggttttagggttttttacgttgttttttatttgtttcgtatagatttttagttttgagattaatgtgagcgttgttattattatttttgttttagagtttaaagtttttatgtttgttttgaacgataattttcgggatatgattgaggtgattagtagtttggaaaatgttaattataaaggtacgggtgttattacgtgatggtgatgagagaggagaagatggatttttttagggtttgtaaataaattttggatgagttaaaaagagagtgaggttttttggtggtatttgagttttacgagtttggggtagttttaacgtttagggttatggtgggggagtttagttgtttttagtttatagtttattttgagatgttgtaggtttaaagatattgtgtaggtttttaattttttttagttgttaaaattatattgtttggtttgtatggttgtatattgttatttttttatgttattagttatttatatattatgtaaagtgtttggttggtatttagtaaatggttgaagttatttaaggttttggaaattttatttttgaattttgggattttagtgtggttttggattggggttatgtaatgaatatttttttttttttttttttttttttttttttgagatggagtttcgtattgttatttaggtttgagtgtagtggtacgattttggtttattgtaatttttgtttttagggtttaggtaatttttttgttttagtttttcgagtagttgagatttcgggtatttgttattatgtttggttaattttttatatttttagttgagatggggttttattatgttggttaggttggtttcgtgattttgattttgtgattcgtttattttagttttttaaagtgttgggattataggcgtgaattattttgttcggttttatgtaatgaatatttttaaggtggaaaggtttttaaagtttgaataagtaatgatgttatatttttatttgaatggtaaatgtttgagtttattaaaataatcgataaattgtatttttaggtcgggtgtagtggtttatgtttgtaattttagtattttgggaggttgagatgggcggattatttgaggttaggaaattagtttggttaatatggtgaaattttatttttattaaaaatataaaaaattagttgggtatggtggttggtatttgtaattttagttatttgggagattgaggtatgagaattatttgaattggggaggtggaggttgtagttagttaagattacg

SEQ ID NO: 54 - DNA, 2500 bp, Artificial Sequence
  chemically treated genomic DNA (Homo sapiens)
cgtgattttggttgattgtaatttttatttttttagtttaagtgatttttatgttttagttttttaagtagttgggattataggtgttagttattatgtttagttaattttttgtatttttagtagagatggggttttattatgttggttaagttggttttttgattttaagtgattcgtttattttagttttttaaagtgttgggattataggtatgagttattgtattcggtttggaaatgtaatttatcgattgttttgataaatttagatatttgttatttagatagagatgtggtattattgtttgtttaaattttaaaagtttttttattttagaaatgtttattgtatagggtcgggtaaggtggtttacgtttgtaattttagtattttgggaggttgaggtgggcggattataaagttaggattacgagattagtttgattaatatagtgaaattttattttaattaaaaatataaaaaattagttaggtatggtggtaggtgttcgaaattttagttattcgggaagttgaggtaggagaattgtttgaattttggaggtagaggttgtagtgagttaagatcgtgttattgtatttaagtttgggtgatagtgcgagattttattttaaaaaaaaaaaaaagaagaagaaaaaagaaatgtttattgtataattttaatttaagattatattaaagttttaagatttaaagatgaggtttttaaaattttgagtggttttagttatttgttaagtgttaattaggtattttatatggtgtatgggtggttaatgatatggggagatggtagtgtgtagttatgtaaattagatagtgtggttttggtaattggaaggaattgaagatttgtatagtgtttttggatttgtagtattttagaatgagttatgagttgggggtagttggatttttttattataattttggacgttgaaattattttagattcgtgggatttaggtgttattaagaggttttattttttttttaatttatttagaatttgtttgtaggttttgagagggtttattttttttttttttattattattacgtgatgatattcgtatttttatagttggtattttttaggttgttgattattttagttatatttcgggagttgtcgtttaggatagatatgaggattttgggttttgaggtaaaggtgataatggtaacgtttatattgattttaaagttgaagatttgtgcggggtaagtgagaggtagcgtaaagggttttgaagttaaaggggagatggtaagagagtaaataaagggttttggaggaggtagagaaattggagtgagatcgatagaggtaaggattaggggagatattaggaaatggttgttaggaagaagttaggggttgggcgcggtggtttatgtttgaattttaatattttaggtaggtggattatttgaggttaggagttcgagattagtttgattaatatggtaaaatttatttttattaaaaatataaaaattagtttggtatggtggtaagtatttataattttagttatttaggaggttgaggtagaagaattatttgaatttaggaggtaaagtttgtagtgagttgagatcgtattattgtattttagtttgggtgatagagattttattttaaaaataataataataataataataaaaataaggaatagtagtagttaaggaagaaatttttgttgaatatttttttttttgatagattttttttattttattttgtgaggggtatgatgatttttattttatggataaggaaattgaggtatgttgttttgtttttttttttttattatattatgaggaggaggtggaagtgggatttgaatgtgttatatgatttttaattattgttttaattggtgtgtgttgtcgtttcgtagtgtaatgagttatttaattttgagttttaagagagtatagaaattgttttttttaaaatgtagttgggagggaaaattatttataatgttatatgaagtattgtgaaaagtataattataaaataaagttttggcgaggaatttaaattagtggtttttaaatttttattatatatattttattttattttattttattttatttatttttttgagatagagttttgttttagttgtttaggttggagtgtaatggcgtgattttagtttattgtaatttttatttttcggatttaagcgatttttttgttttatttttttaagtagttgggttataggcgtgcgttattatacgtggttaattttgtatttttagtatagatagggttttattatgttggttaggttggttttaaatttttgattttaagtgatttatttgtttcggttttttaaagtgttgggattataggtattagttattatgtttagtttattatatatattttaaagtttgtataaaatgttgaagttttaaaaggaaattattaaatattaaat

SEQ ID NO: 55 - DNA, 2500 bp, Artificial Sequence
  chemically treated genomic DNA (Homo sapiens)
ttggtgggatttaatgggtttgggaagagtatagtggttgttttgttgtagaatttgtattagtttatcgggggatagttgttgttggatgggaagttttttttttaatatgagtatcgttatttgtataggtaggtatggaagtaggtggtttgaaggagggtagggagtattaaatacgaagagtatttttattgagtattttgaaagaggggttagggaatgataagagattttgggtggagatggtggtgtagttaggagggaggtagtatgattttgtgatatgtttttaataaagattttgagttttcgatttttagataattatatttttatgtgttttgttttatgattttttattatattttattttaggtggttgtagtgggataagagttataggtatttggaagaagtttttaagaaaatattgtttatggtttgatttagaagttaattatggaggaaattatagttgttgtagtaaagtttggggtttatagttttatttttggatttttttagggttatgatataggtattttttttatttattttattatttagttatttttatttttgttgaaattttagtagttttgtttttattttttagtttttttttatttatggatattaatttgaagttgtaagattatgtttttatggtttttttattttgatatttttaggattttgtttatttttttagaattttttttatttagttataatcgttagattttggtgtgtgtgagtgcgtgaatgtatgagtgtgtttgtgtgtatgtatatgcgtgtatatatgtggttatatcgtttttattttggttttttgttttgtagaggtagacgaggttgggagttagttgttagggggttagcgataggtagtggcgttggttcgagtattgattcggaaatcgtgtgtatttattttggatgatgttattagtgttttggatgtaaatagttagttataggtgaggtagttatttttttaatggttatattttatttaattttgttttttttatatattttttgttagttttattaatattataattatataaattagtttttgtagtttttagtttttaaatttagttttattggatgtttttttaaggagtagagatagaagacgaggtaaagatatttagaattagttaaaagagattatttataaattatagattgaatttttttttttttttttttttttttttttaagatagtgttttatttagttgtttaggttggagcgtagtggtataattttggtttattgtagttttaatttgttgggtttaagcgattttttttttagtttttcgagtagttgggattataggtgtatattattatgtttggttgatttttatatttttagtagagatgggttttattatgttgtttaggttggttttgaatttttgagtttaggtaatttgttttttttagttttttaaagggttggggttataggtgtgagttattgcgtttagttttatagattgaatttttaaagcgaaatataaggaaaagattatttttataatatcgtttatttaaaaaaattattttttgtatagatagcgtttcgttatgttgtttaggttggttttgaatttttgggtttaagtgattttttttttttgattttttaaagtgttaggattataggtatgagttatcgggtttagtttattttaattatattaatattaattaagttagtttgtttatatgtattgttatttatttatttattaggaatttttttgagttaggtatttattattattttatagatgataaaatggaggttaaaagaggttgaataagttgtttatatagaggttatatagtttttgagtggcgtagttttgatttaaatttaggtttgtttgatttgaatgtttatttttttattattaagttatatttttttaaaatcgaatataaaaatgttaagtttatgggtagagaagaggattatttaatagtttttatttttttgttacgtgttttattttagggtttttatttttattttatttttgtattttttatgtaaaatagtttttaatgaaataaagggtttgcggagaagtatttagaatgggaaacgttggtgtttttggggttgttagtagagttagtagtgattttgtgaggttagttttagttttggaaatataggtgtttttttgggttgagggtagttttcggttttgacggttcgatgtttttttttaggtggagtagtttttgtacgaaagttttgagcggtattttcgtttagtgttttttattatttagtattttagtttggtggagtaggttgattatattttttttttggaaggaggcgttattcgggaggggggaatttattagtagtttatggagaaaaaggggtgttattgggttatggtgtaggtttttgtagatgttttagaatgaaagtttttttagatttgcgtatttt

SEQ ID NO: 56 - DNA, 2500 bp, Artificial Sequence
  chemically treated genomic DNA (Homo sapiens)
ggagtgcgtaggtttgagaaggtttttattttggagtatttgtaggagtttgtattatggtttagtagtatttttttttttttatgagttgttggtgggtttttttttttcggatagcgtttttttttagaaagaggatgtggttagtttgttttattaggttgaggtgttgggtgatgagaagtattgagcgggagtatcgtttagggttttcgtataggagttgttttatttgaggaaagatatcggatcgttagagtcggggattatttttagtttagggagatatttgtgtttttagggttgggattgattttataggattattgttggttttgttaataattttaaggatattaacgttttttattttgagtattttttcgtaaattttttgttttattaaggattgttttatatgaagggtgtaaaagtaggataaaaatgagaattttagggtgaaatacgtgatagaagaataaagattattgaatagtttttttttttatttatggatttggtatttttatattcgattttaaggaaatataatttagtagtaaagagatgagtatttaagttaggtagatttgaatttgggttaaggttgcgttatttaaaagttatatgatttttatatgagtagtttatttaattttttttaatttttattttgttatttgtagaatgatgataaatgtttagtttagaaggatttttaatgaataaatgagtgatagtgtatgtaaatagattagtttaattaatattaatatgattaggatgggttgggttcggtggtttatgtttataattttagtattttgggaggttaaggagggaggattatttgggtttaggagtttaaggttagtttgggtaatatagcgggacgttgtttgtataaaaaataatttttttaaataaacgatattatgaggatggttttttttttatgtttcgttttagaaatttagtttataggattgggcgtagtggtttatatttataattttagttttttgggaggttgaggggggtagattatttgagtttaggaatttaaggttagtttgggtaatatggtgaaatttatttttattaaaaatataaaagttaattaggtatagtggtgtatatttgtagttttagttattcgggaggttgaggggagaatcgtttgagtttagtaggttgaagttgtagtgagttaagattgtgttattgcgttttagtttgggtaattgagtgagatattgttttaaaaaaaaaaaaggaaagaaagaaagaaatttagtttgtagtttgtagatagttttttttaattgattttaggtgtttttgtttcgttttttatttttattttttggggaggtatttaatggaattggatttgggaattgagaattgtaaggattggtttgtataattatgatgttagtaaaattaatagaagatgtataaaagaagtaagattgggtgggatatagttattaagaagatgattgttttatttgtaattggttgtttgtatttagggtattggtggtattatttaggataagtatatacggttttcggattaatgttcgggttaacgttattgtttgtcgttgattttttgatagttggtttttagtttcgtttatttttgtagagtaaagggttaagatgagaacggtatagttatatgtgtgtacgtatgtatatgtatatagatatatttatgtatttacgtatttatatatattaagatttgacggttgtagttggataggggagattttgggaagatgaatagaattttgaggatgttaggatgaagaagttataggagtatgattttataattttaaattgatgtttatgagtaaggaggaattgaaggataaaggtaagattattggggttttagtaaaggtaaagatggttgggtggtgagatgagtggagagagtatttgtgttatagttttgagggagtttagagatgaaattatgggttttagattttattgtagtagttgtgattttttttatagttggtttttgggttaggttataggtaatatttttttgaagattttttttaaatatttgtggtttttgttttattgtagttatttgagatgaaatatgatgaagagttatagaataaggtatatgggagtatggttatttagagatcgaagatttaaaatttttattgagaatatgttataaaattatattattttttttttgattatattattatttttatttaaggttttttattattttttaattttttttttagagtgtttagtaagaatgtttttcgtatttgatgttttttgtttttttttaagttatttgtttttatatttgtttgtgtaggtagcggtgtttatattggggaaggggttttttatttaatagtagttgtttttcggtgggttggtatagattttgtagtagggtagttattgtgttttttttagatttattgggttttattag

SEQ ID NO: 57 - DNA, 2500 bp, Artificial Sequence
  chemically treated genomic DNA (Homo sapiens)
taatgatttttaatttatttttttttttagttagttttttttggggtgggtgggtattagggatttagtttttttggatttttggtgttttttattattggggttttattgatttttttagttatgtttttttgttgattgttagttttagttatgggtttaaggttttttattttattttttttagggggtttttgtttaggttttttgttttttttttttcgttgttagttttttcgtcgtcgttgttttttttgttgtttttcggggggtaggtgaggtcggagttgaggggtagagggaggtgggggtatgtattggggttaggggtgggaatttgggttaatagttttttttttggttttttttttaattttttttttggttatttttttttttttagaatattatttgggtcgttcgaggaggaagagtgttttaggggggaagtagtatagtatggagggtgtttttgttgcgttttttcggttttcggtgagtggtgtttattagatgtggtttagttgggtttttttttttttagttttaattggggttttaggagtttgagaaagagggtaggagggggagagagggagtgagagtgagaaaaagagtgtgtgtttgtgtgtgtttttttatttttttggtttttttttttttggttttgtttttttgtttttgagattagtttttttattttttttaagttgtgtgtgtgtgtatatgtgtgtgtgtgtgtgtttgtattgtattcgtgggagtaaggaagataaattggtattagggtttttattttttttttttcgtttttggagattttttttttttttattttatttttatttaggggttttttattagttgagggatgagtaggtagaattgattttgttttaatttattttatttttattttttttttagtaaggttttttgagtcgacggttaaaaagttttattaaacgaacgaagttataatttaaatttgatcggattagtagttttcgttagattttgtttcgttttcgaagtgttgattatgatcggtataggggttggagtatgtgggatgagattgatgtaatgtagggttttttgtgtgagatgtagagggagggggttatttgtgtgtaaaggttgaaggatttaatttaagttggttgggggatgttatggtataggggatagaatagaaaagaattagaatagggatttgtgagtagtaggagaggggtagggtggtagagagaagatagatagataggttggaaagggaatgaaggtgaagttaaggagggattttttagggattttttaggttaagaaggatgggttttagtttaggattaaaggagttgtataggaggagagtgattttggaggaatgtttaaggaatgtagggaaggggttggtaggtgagtgagtaataggttgtaggtggaagggtgttagggaaggttaggaaatataggggtagtaggttggagtggggttgggggtggttgaatgaatggatgatggttagggtttaaggattttattagtgagggaagagatagtatagagtatggtagagaaggggaggttgggataggtgtgtagggtgatagaatgggaagtaatttatggattgaggtatgaagaagtagttagcggagaagtttagaaggtattgtttttgagattaggttgaaggagatttttattgtttgtttttgttgtttgttatttggggtttttttttgggttttttttttatttagttattttttagggagaattatgtttttttttttttttatgtttggttatttttaggattgggtaggtagggaggttgggataaagtgagttatatttttttttgttttttttttatgttgttagagttggatttggggtcggtagggggtgagggtatggtatttttggtcgcgggggcgggggggggggttcgggggtcgggggagcgtcgcgttgacggtagttagagtttgcgatgacggggttgttataaataattttttggaggtttttatatttaagtttttttttcgtttttttattgttttttattttttattttttgtttatttttatatcgtttttgtattgttattttattttttattattttatgtttttagttttttttattttttgtttttttgtagtgatttttttgtattttatttttttttagtttttatttcggttttttcggttatttttttagttggttttttttttttttttttgttttttgttttgttgtatatatttttgttttttttttttttttttttgttttattttttttttttttttagttcgtgtattttgttttttattttttttgagtttttttttgtttatagtttttttttattttttatgttttttttttatttttttttttgtttttgttaaaatttgtttttttatgttgtgtttatttattttttgaattattaaatgtttattaggtattagtcg

SEQ ID NO: 58 - DNA, 2500 bp, Artificial Sequence
  chemically treated genomic DNA (Homo sapiens)
cggttagtgtttgataaatatttaatgatttaaagaatgaatgaatatagtataagaggataagttttagtagaagtaggggaaagagtgagggaaaagtataagaaataggagaaagttgtgggtagaaaagagtttaaagaggataaaagatagaatatacggattagggaagaagaggaggtagggtaagaagaagaaagggggagataaaggtatgtgtagtaagatagaggataggagaagaggaggaaggttaattggagagatggtcgggagaatcgaggtgagggttaagaggggatggaatgtaaaaaaattattgtaggagggtagaagataaagggggttaggggtatggaataatgaggggtaggatagtaatataaaagcggtatggagatgggtaggggatgaagagtagagagtagtgggaaagcgggaggggagtttgggtgtgggagtttttaagaagttatttatagtagtttcgttatcgtaggttttggttgtcgttagcgcgacgttttttcggttttcggattttttttttcgttttcgcggttaggaatattatgtttttattttttgtcggttttaaatttagttttggtaatatgggaggggggtagggaaaggtgtgatttattttattttaatttttttatttgtttaattttgggggtggttagatatgggggaaagggagggtatggttttttttggggagtgattgggtgagggggaaatttagagaggaattttaaatggtaggtaataaaggtaaatagtggaggttttttttagtttggttttagggatagtgttttttggattttttcgttggttgtttttttatgttttagtttatgggttgttttttattttgttattttgtatatttgttttagtttttttttttttgttatgttttatattgtttttttttttattgatgaggtttttgagttttagttattatttatttatttagttatttttagttttattttaatttgttgtttttgtattttttgattttttttgatatttttttatttatagtttattgtttatttatttattaattttttttttgtattttttaaatatttttttagggttattttttttttgtatagtttttttgattttgggttagagtttattttttttggtttgaggagtttttgaggagtttttttttggttttatttttattttttttttagtttgtttgtttgttttttttttgttattttattttttttttgttgtttatagatttttattttagtttttttttgttttgttttttgtgttatgatattttttaattaatttgagttgaattttttaatttttgtatatagataattttttttttttgtattttatataggagattttatattatattaattttattttatatgttttagtttttgtatcggttatggttagtatttcggaagcgaggtaggatttggcgaaagttgttggttcggttaagtttgggttgtgatttcgttcgtttgatggagttttttagtcgtcggtttaggaagttttgttgggggggaaatggggatggggtgggttggggtagggttagttttatttatttattttttagttggtagagagtttttggatgaaagtgggatggggaaaagggaagtttttagaggcgaggaaagggggataggaattttaatattagtttgttttttttgtttttacgggtatagtgtaagtatatatatatatatatatatatatatatatagtttggagaaggtgggagggttggttttagaagtaggggggtagagttaagaagggggaaattaaagaggtggggagatatatatagatatatatttttttttttatttttatttttttttttttttttttgtttttttttttagatttttagggttttagttggggttggaggggagggggtttaattgagttatatttggtaggtattatttatcgagggtcggaagggcgtagtaggggtattttttatgttgtattgttttttttttgggatatttttttttttcgagcgatttaagtggtattttggaggggaggaaatggttagaagggaagttggggagggggttagaagggaagttgttaatttaggtttttatttttgattttagtgtatgtttttatttttttttgttttttagtttcggttttatttatttttcggaaagtagtaggaagagtagcgacggcggagaggttggtagcgggaaggagggggtaaggaatttgagtaggagttttttgagggggatggggtgggaggttttaggtttatgattggggttggtagttagtaggggagtatggttgagagggttagtaaaattttagtaatgaaggatattaaagatttagggaggttaggtttttggtgtttatttattttagaaggggttagttggggggaaagatgggttaaaggttattg

SEQ ID NO: 59 - DNA, 2500 bp, Artificial Sequence
  chemically treated genomic DNA (Homo sapiens)
gttttattatttttaattttttaagattattttttttgggtaattaggtaggtggggttattgggtgattttatattttattatttaggtggttgtggtaacgaatattgttgagatattatttattattgagggtattatttatgtgttggatttagggttttgtaagtagaagagttataattttcgtataggtatggaatcgtttattgttatattttgtagtaaggttagtttggggatgtatgggagtgggggaggtggagttggtttatagagaaggtttaatttagaagtagggtgggggttttttagggaatcgggatgagtagtttgtatttttttagattttttgtataaatattgttttttttttttttttgattaaattgttagttagtttgtttttttttttttttaggttttagttaattagcgagttggtagggtaggtcgggtggttgtagggaagtgttttcgtttgtatatcgtttgggtttattagtacgagtttgaggaaattatagtgtttgagatttagaggattagtttgggtaatgtcgtgttgttgtttaagagtttaggtgattgggttatttgagagaggagggaggggttggagttattgttttttgaagggattttgttttatttattatatttttttttagggatttatgatttaatgtattttgattttttggattttttattatatgagatattgttgttggttttggagtagttgtatgttttgggagtttttaattattttggggagtttattacggtgagtcggggggtagtatgggtggaggtaggatgataggggttaggatggttttagggatttttgtagtagtagcgggaaatttgagggaggattgggtttaatttttttttttttttttttagtttggtcgaaagatggtagagttgtcggtggattttatgttgtttaaaatgattttagtttttgagaagtaagttttcgtttttatttgggtttttagtatataaataggttaggttttttttgtttttagggttttttttgtttgtttttttttgtttattatattattttttaatatataataaagtattagataattttgattgtttttttttgaggtttataagggtaagatatttgattttatttttgattttattgcgttcggttttttgaggaatttatttgtttttaaggtttttaattagaatatttagatgtagttgtggagggatgatttttaaatgttatttttttgttgttagagattttttttaaatgtatatagtgaatgtatattttttgtagaagttttagaatttttcggtgttttttgtttttgtttttatggatgttttttttttgtgattgtgttttatttatggtttttatttttttgatttttaagttgttgttagaatttatttgttggttgttttgtagttattatgttaattagttttttttatatgaggaaatatttattatatagtgattattttttattttattatatttgtttttatgtgttttgttttgaatttatgtttttttttttttgttttaggtatagttgtttagaggagattttgatagtggttgttatgttttttgttaataattttattttttatcgattaaaggataaggtcgtttatgttgataatgttcgtgttaatttttttttttttggcggtgattatttggttttgttaaatgtttatatataggttattgggtttgggtgagtgggaatgagagatattgggggattttagttttgttgtatatttaattattttttttttttttttaattgtttttttagtgggttgagagtggttattttttttagtggtgttatgagaattttgtatagtttagatcgatgcgtcgagttcgggatgtgcgggaatagttggaagggtttttggaacgtgtggaagttggttttagtttttgttagggggattatattcgtgtacgtaaggttagtatttttttagttttttgttttttatttttagtatttttttaggagtaagtttttttgggggtatgtagtattttttttagcgtgagagtatgtttttttttttttgtgtatgacgtgtttttttagggtttttttttttttagattattgaaggtttatttttgggaagttttttatgtattttttatttttttagtttttttgaagtttgaattaaaaaggtagtgtatttttagggtttttagatgtttgttttttttattgatttttttttttgttcgttttttaggttattattgttggttatttttattatacggtacggttgattcggagtggttatcgtatagtgaaatagtagtagatagtttttatttattttaatttttttttttttgagtaatagttacgttggttgttttattacgaatttgttttgattattaaagagtttatgagataggtgaggagaatattttgtgtttacg

SEQ ID NO: 60 - DNA, 2500 bp, Artificial Sequence
  chemically treated genomic DNA (Homo sapiens)
cgtgggtataggatgttttttttatttgttttatgaattttttggtggttaagataagttcgtggtagagtagttagcgtggttgttgtttaaagagggaggagttgggatgaatgaagattgtttgttgttgttttattgtgcggtagttatttcgagttaatcgtgtcgtgtggtaaaagtaattagtagtgatggtttaaggagcgggtaggaaagaaaattaatggaaaaggtagatatttggggattttaagaatgtattatttttttagtttaggttttaggaaaattagagaggtaaggaatgtatgaagaattttttaggaatgaatttttagtggtttggggaagaaagggttttgggaggatacgttatatataaggggaagagggtatgtttttacgttggaggaaatgttgtatgtttttagagaagtttgtttttgggaaggtattgggggtggaaagtaggaggttgaagaaatgttgattttgcgtatacggatatagtttttttggtaggaattgagattaatttttatacgttttaagagtttttttagttgttttcgtatatttcgggttcggcgtatcgatttgaattgtataaagtttttatagtattattgggaagagtaattatttttagtttattgggaagatagttaaaaagaaaggagagataattaagtatatagtaggattaaagttttttagtgttttttatttttatttatttaagtttagtgatttgtgtgtaaatatttagtagaattaggtggttatcgttagggagaaagaagttgatacgggtattgttagtatggacgattttgttttttggtcggtagaagatggagttgttgatagagagtatggtagttattgttaggattttttttgaatagttgtatttgggataggaaggggaaagtatgagtttaaagtaagatatataggaatagatatggtggagtggggagtgattattgtgtgatggatgtttttttatgtggggaaggttggttggtataatggttataaagtagttagtagatagattttggtagtagtttgggggttaaggaagtaggggttatagatgaaatatagttataaaggagggatatttatggaggtaggagtaggaaatatcggggaattttgaggtttttgtagaaagtgtgtatttattatgtgtatttggaaaagatttttgatagtagaggaatggtatttaaaggttatttttttatagttatatttaaatgttttagttggaaattttaggaataagtaagttttttaaggggtcgggcgtagtggaattaaggataggattaagtgttttatttttgtgggttttaaaagggggtaattagagttatttaatattttattatgtgttaagggatagtatgatgaatagaaaaagatagataaaggggattttggagatagaggaggtttggtttgtttgtgtgttgggggtttaggtggaggcgagggtttattttttagaggttaagattattttggatagtatggggtttatcggtagttttgttatttttcgattagattaaggagaagagagagagagttgagtttagtttttttttaggtttttcgttattattataggggtttttggagttattttgatttttattattttgtttttatttatgttgtttttcgatttatcgtggtgagttttttaaggtggttgagggtttttagagtatatagttgttttaaagttagtagtagtgttttatatggtggagggtttaggaaattaaagtgtattaggttatggatttttagaaagaggtgtgatggatggaatagagtttttttaaaggatagtgattttagtttttttttttttttttaggtagtttaattatttaagtttttgagtagtaatacgatattgtttaagttggttttttggattttaggtattgtggtttttttaagttcgtgttgataggtttaggcggtatataggcggaagtatttttttgtagttattcgatttgttttgttagttcgttgattggttgaggtttggaaagaaaggggaataggttggttgataatttggttagggaaaagaaaaaggtagtatttatgtaagaaatttggaaggatgtaaattgtttatttcggttttttaggaagtttttattttgtttttgagttggattttttttgtgggttaattttattttttttatttttatgtatttttaggttgattttgttgtagggtgtgatagtgagcgattttatgtttgtgcgggggttgtagtttttttgtttatagaattttggatttagtatataaatgatgtttttaatggtgagtgatgttttagtaatgttcgttgttataattatttgagtgataggatatggggttatttagtgattttatttatttagttatttagaaaaagtaattttggaaagttaggagtagtgaagt

SEQ ID NO: 61 - DNA, 2500 bp, Artificial Sequence
  chemically treated genomic DNA (Homo sapiens)
ggttgatcgtttgaggttaggagttttagattagtttagttaatatggtgaaattttatttttattaaaaatataaaaattagttaagtatggtggtatatgtttgtaattttagttatttgggaggtggaggtacgagaattgtttgaattcgggaggtagaggttgtagtgagtcgagattattattgtattttagtttggtagatatagttaaatttagttttaaaaaagaagaaaaaggagtttaaatttttgtaaggatgttaattataattatttgaaagtaataggtatggtaagaagattggaaagaaatatattttacgggttgtttgatttgttagatagaatagaatattttagtatatttttttttgtattattttattttgtatagtttaaatttttttaaatggtaaatattttttttataattagggaaagggaaaagagaaaatatataatgttttttttttttttatattttatttgttttatttttttatcgtttttgtggtttattttatttattttttttttttttttttttgagatgaagtttcgtttttgtcgtttaggttggagtgtaatggtatgatttcggtttattataatttttgttttttggatttaagcgatttttttgttttagtttttcgagtagttgggattataggtatgcgttattatatttggttaattttgtatttttagtagagagggagtttttttatgttggttaggttgtttaaatttttgattttaggtgatttgttcgtttcggttttttaaagtgttgggattataggtatgagttatcgcgtttagttagatttattttatttttaattatgaggaagtttaaaatttttagtttataagaaattggaggggtggagattatgaggttaattgaattttaaatgtttagttaggttgttttttttaagttatttttagttaggttgttatgtttggtttagagtatttttcgagaatttttatcgatggggaagaattagttttgttgagaggcggttttttgtagggtaggtcgttatttttgtggtattaagtgaggtgcgagtttattttttaaaggttatttagatagaggaagtatttttaatcggtattttcgatttttgggggagaggttttatttttatatgtatgtttagaggattatttgagtgttgggaaatagggggaatagggaaattattggaaaatgaatattagaaaaatttatatttcgggggtaagttgttttggtttacgtttagttttgtgtttttgtttttattgtggggaattatagaattgatagaggataggttgagggatttatttttgttttttttgttttatgtgtattgttgttttatttttattttatattttattattaattgttgtagtttagaattttttttttttttttttttttttttttttttttttgagattgagttttattttgttgtttaggttggagtgtagtggtgtgattttagtttattgtaatttttgttttttaggtttaagtgattgttttgttttagttttttgagtagttgggattataggtgtatgttattacgtttggttaatttttgtatttttagtagagatcgggttttatgatattggttaagttagattcgaatttttaattttaggtgatttattcgtttcggttttttaaaatgttaggattataggcgtgaattattgtttttagtttagaattttttttttagtttacgtttttttagtgaaaataatatagtaatattatgtggaaagtttgaaaaatagaaaataagaattttatagttttatttttttttttagttgtcggtattaataataatgtgtgtagtgtatattttttttttgtattttgtatgtagagcgtgttttaaagttgtaattagtgtttataaagtttttggtatttttttttttgtatataagtatattgtaattatttattttacggttatataattagtatttattatcgttttaatggttatttgatgcgttgcggtgaaagtattataataaaattaattattttttacgggttatttgtgtttttgatatatttgttgttatgaataattttatcgtgagtttttttatgttataatttttttttgttttaataatttttttaggatagatgtttagaattgggattattgggttaaaggaaatgagaattattttggtttttgatattatgttttagttgttttttggaggtttttaatagtgtagttttgttagtagtataggtcgggggttcggggatattttatcggtttttattttaagagttattgaacggcgaatataaagttgttttagtttttagtttgttttggaggggcgtatttgatgtatgatttttgttgatagtattagtaaagtaagttgtttttaaatttttaaattttgtatttttttatattattttttagttttat

SEQ ID NO: 62 - DNA, 2500 bp, Artificial Sequence
  chemically treated genomic DNA (Homo sapiens)
gtggggttgaaaggtaatatagggggatatagagtttaagggtttaagggtaatttgttttgttggtgttgttaatagaggttatatattaaatgcgtttttttagagtaggttgagggttggggtagttttgtgttcgtcgtttagtgatttttggaataagagtcggtgaggtattttcgagttttcggtttgtattgttggtagagttgtattgttagaaatttttagaaggtaattgagatatagtgttaggagttaaagtaatttttattttttttgatttaataattttagttttgggtatttgttttaagaaaattattaaagtaggaaaaagttatagtatggaagaatttacgatggggttatttatgatagtagatgtgttaggaatataaatgattcgtagaagatgattaattttgttatagtgtttttatcgtaacgtattaaataattattgaaacgatgatgaatgttggttgtgtagtcgtgaggtgaatgattataatgtatttgtgtataaaaaaggaagtgttaagaattttatgaatattgattgtaattttaaaatacgttttgtatgtaaaatataggaagggaatgtgtattatatatattgttattaatgtcggtagttgggggagaaagtaggattatgagatttttgttttttgttttttaagttttttatataatgttgttgtattatttttattagaaaaacgtgggttaaaaaagaaattttgggttgggagtagtggtttacgtttgtaattttagtattttgggaggtcgaggcgggtggattatttgaggttgggaattcgagtttagtttggttaatattatgaaattcggtttttattgaaaatataaaaattagttaggcgtggtggtatgtatttgtaattttagttatttaggaggttgaggtaggataattatttgaatttgggaggtagaggttgtagtgagttgagattatattattgtattttagtttgggtaatagagtgagatttagttttaaaaaaaaaaaaaaaaaagaaaaagaaagaaagaaattttgggttataataattaataatagagtgtggggtgggggtggggtagtaatatatatagaataggaggggtaggggtgggttttttagtttgttttttgttagttttgtggttttttatagtggagataggaatataaaattgaacgtggattaggatagtttattttcggaatgtgaatttttttaatgtttattttttaataatttttttattttttttgttttttaatatttagatggttttttgaatatgtatatggaaatgaggttttttttttaggaatcggggatgtcgattgagagtgttttttttgtttggatggtttttgggagatgagttcgtattttatttggtgttatagaggtggcgatttgttttgtaagagatcgttttttagtagggttgatttttttttatcggtaggaattttcgaaaaatattttaagttaggtataataatttggttgaggatgatttagaaaaggtagtttgattgagtatttggaatttaattaattttatgatttttatttttttaattttttatggattagaaattttgaatttttttataattagaaatgaaataagtttggttgggcgcggtggtttatgtttgtaattttagtattttgggaggtcgaggcgggtagattatttgaggttaggagtttgagtagtttgattaatatggagaaattttttttttattaaaaatataaaattagttagatgtggtggcgtatgtttgtaattttagttattcgggaggttgaggtaggagaatcgtttgaatttaggaggtagaggttgtagtgagtcgagattatgttattgtattttagtttgggcgataagagcgaaattttattttaaaaaaaaaaaagaaggaaataaatgaaataagttataagagcgatagaggagtaggatagatggagtgtaaagaaggagaagatattatatatttttttttttttttttttttgattgtaaaagaaatgtttgttatttaagaaaatttggattatgtagaatagaataatatagaaaaaaatgtgttggaatattttattttatttaataaattaggtaattcgtgggatgtgtttttttttagtttttttgttatgtttgttatttttaaatggttgtgattagtatttttataaaaatttgggtttttttttttttttttttgagattgagtttggttgtatttgttaggttggagtgtagtggtgatttcggtttattgtaatttttgtttttcgggtttaagtaattttcgtgtttttattttttaagtaattgggattataggtatgtgttattatgtttggttaatttttgtatttttagtagagatggggttttattatgttggttagattggtttggaatttttgattttaggcgattagtt

SEQ ID NO: 63 - DNA, 2500 bp, Artificial Sequence
  chemically treated genomic DNA (Homo sapiens)
tgtgtgttattgtaatgatgtaataagtgggttgtagggtcggatagattttttcgttttttgtaaggggttgtaaggtataaatagttgagtgtgggatagagttagatttgtttttgtgttaagtcgttttagtgatttgtaaatgggaaattagaaatagtatttatattgatttgttataagggttaaatgaatttgtatttgttaagtgtttagaacgtgtttgaaacgtaagtatatttaggttttgtgatgggtttttgttttattgttagagtttgttaaataaataaatattgagattttggataagttttttattttttttggataaggaattttgtcgaattggatattatttagtttttttatttgtaaagtagattcgttgtttatttgagaaatttaatttaaagggttaagtggagtgtttaggttatgatagattgaggaggaaggtagggagggatcgaagagttagagaggttggagggaagtggttgtgagttggatgtggttgtgtgtgtttaagagaggggatattttttttttgtggtcggaaggtagggttggaatttttattttatttttatttttttcgtagaatggatatattaattttgataagcggaggaaggtgagcggagtgtttgggttggatgttggatttttttatttatgttttaggaaggggagggggaaaagttaggggtttttgagttttggtttttgtagtttgagggtttttttttaggagtttgtagttttttttgagttgcgacggttttagaatgaatgtcgtggttataatttttaatttgattatgatatttagaggtggttataggggtttcggttattgatagaggtttagaggtgattggcgggtgaggttgggattttagggttttggttaggtgtgggggattggtgttatgttttgagttttgtttattgtttttttaatttagttatcgtgtattttgtgaggtggagttatttggttttagtgatttttttgttttacgggtgtttcggttaatattggttatttcgtagtggatagagtgagagatttattggttggggggtggttttttgggatttttatttttttttgatttttttaattttttgttattgtagggttttgggttttgttggggtttttatttcgtttgtgttttgtgatcggtttagtattgggggagatgaggcgtttataatttttgtttttttgttgattcggttggtttaggtgagttttgtttttgattttgattttgacgttgatttttattttgtaaatgttttttttttaaatttttttgtttttatgttagttttatgttgtttgtttttagtatatgaagtggttatttgtttcgttattagattttgttttggaaagtagtttatttttgtatagtttagttgattttagttatttttttttattagtttttttttttaggttttttcgaggttatcgtcgtttagttttttgtggtttttcgttgagtgggggtgtagaagaggttttcggggggattggatatgggggagagggatttgggttaggggtttttgattgtcgtattattcgagtttagatggagttgggggaagatggtagtgtttataagagtattttggtgagggagttttgggatggagttggggtgaaggatggtgttttgttggattataaatgttgtttgaggtttgggtagttaaatggaattgaatgtagttttaattttgatttttggttttggtagttatgttttatttttaattttattttttaaattttagtttttaatagaagttgaaatttgttttattttgatggttattttgtattagttgttatattttaaatttttggtcgtcgtgttaaaattttagaattaatagtagtttttttatagggaagtagttttgttttattgggtattatgtgggttggtttatggggtataggaagttattatattgggtttttttgtttattttaaagttttggatataagtaatattttgtggttgggtttagtggttgagggtagaaggatgggaaattatggttgattgattgtttttttggttttttgttttgttaggtgataagttaggataaggttttaagtgttattagtcgtgtttttaagaaaaataatcgtgattttgtagtggttttagagtatgagttggtatagttgttattaggggagcgaggttagaggttatgagggaaaggtagattcgggaggagagtggagtatttttatatttgggcggttgtggggggaataattgtgtgtgtgttttatatttattttttgaatttttagagttgattattttagtttcggttaatgtattttacgttatggatggagttttatacgatttttttttgcggtagcggcgaaggttttttattgttatatttggcgttattagtggttcgtttgttttaggaattttttcg

SEQ ID NO: 64 - DNA, 2500 bp, Artificial Sequence
  chemically treated genomic DNA (Homo sapiens)
cggaggagtttttgaggtagacgggttattggtgacgttaggtgtagtagtagaggattttcgtcgttgtcgtaggaggaaatcgtgtgaagttttatttatggcgtagaatatattagtcgaggttgggatagttagttttgaaggtttaggggatggatgtaaagtatatatatagttgttttttttatagtcgtttagatgtggaagtattttatttttttttcgagtttgttttttttttatggtttttgatttcgtttttttggtagtagttgtattagtttatattttgaagttattgtagagttacgattgttttttttaaggatacgattgatgatatttggagttttgttttggtttgttatttggtagaataggagattaaaagagtaattaattagttatgattttttatttttttatttttagttattgaatttaattataaaatgttatttgtgtttaaggttttaaaatgaataggaaaatttaatatggtggttttttatattttataagttagtttatatggtgtttagtgaaatagagttgtttttttgtggggaaattgttgttgattttgaaattttaatacggcgattaaaagtttaaggtgtagtaattaatgtaaaatagttattaaaataaaataaattttagtttttattgaagattagagtttagaagataaaattaaaaataaaatataattgttaaaattaaaggttaaaattaaaattatatttaattttatttggttgtttaaattttagataatatttatagtttaataagatattattttttattttaattttattttaaggtttttttattaaaatgtttttatagatattgttatttttttttaattttatttggattcggatgatacggtaattagaggtttttggtttagattttttttttttatatttagttttttcggaggttttttttgtatttttatttagcggggagttataggaggttgagcggcggtgatttcgagaaggtttaggggaggaggttggtggggagaggtggttggggttagttggattgtgtagggatggattgttttttaaggtagagtttagtgacgagatagatggttattttatgtgttaggaataaataatatgggattggtatgaaggtagggaggtttaaggaagaaatatttatagagtgagggttagcgttaaggttagagttaggagtagagtttatttgggttagtcgagttagtagaggagtaggagttgtaggcgttttattttttttagtattgggtcggttataggatataagcggggtagggattttaatagagtttaaaattttgtagtggtaggagattgggaggattagagaaaagtggaagttttaagaaattattttttagttagtgaattttttattttgtttattgcgagatgattaatgttggtcgaagtattcgtggggtaggagggttattggaattaggtggttttattttataggatatacgatggttgggttaggggggtaataggtagagtttaggatatgatattaattttttatatttggttagaattttggagttttaattttattcgttagttatttttgagtttttgttagtggtcggagtttttgtagttatttttggatattatggttaggttggaggttatagttacgatatttattttggagtcgtcgtaatttagaaaggattgtaaatttttgggaaggagtttttaaattgtaggagttaaaatttagggatttttgattttttttttttttttttttggaatatggatagggaagtttagtatttagtttagatatttcgtttattttttttcgtttgttaaaattgatgtatttattttgcgaggaaaatggggatggggtgaaagttttaattttatttttcggttatagagagagaatatttttttttttaaatatatatagttatatttaatttataattatttttttttagtttttttgatttttcgatttttttttgtttttttttttaatttattatggtttaagtattttatttgattttttaaattgaattttttaggtagataacgagtttgttttgtagatgagaggattggatagtatttaattcgataggattttttatttagagaggataaggaatttgtttaaggttttagtatttgtttatttaataaattttagtaatagagtaggagtttattataaaatttagatgtgtttacgttttaggtacgttttaagtatttgataaatataaatttatttaatttttataatagattaatgtagatgttatttttagttttttatttatagattattgaggcgatttggtatagaaatagatttggttttgttttatatttagttatttgtgttttatagttttttgtaaggggcgggggggtttgttcgattttgtagtttatttgttatattattgtaatgatatata

SEQ ID NO: 65 - DNA, 2500 bp, Artificial Sequence
  chemically treated genomic DNA (Homo sapiens)
ttttatttttttttgttttttttttttgcgtgtgtgttttgggtattttaatttggattttttttttttttttttaatgtattttattgtgtgtttaatttaggagttgtttcgggagtagtttttgttttttggttttattggtatagaacgattatagtatatagatcgaggtatagagtttggttttattcggttattttatcgatttggttttttagtttagtttggtattagtgataaggtttgtgtgggttggatttgggtattttgagttgggtggagagaagggaaggattaaaggtgggatatagaggatatatgtttgttacgggataatgttttttgtttttttgtgattataggatttagatttacgtttagtggtaggagatagtttgaaagtagagaaggagttaatagtattagttattgaggtaagtgggagtaagagtttggtggaaaggtttaagatttttggggaagattgttgggagtgattagggcgtttaggatgttagatatttttttttacgaggttttttttttttaggttatttttgtattacgagattgggagttgttttttagtgttgttgtttttgttgagttataatttaagaatttggattttgggtattgtgtttcggagtttagttttttaggttagcgtttgtattttgaggttttttatggtagtgttgggttttttagtttttaggtaggtttcgttttttattgtatgatttttttagtgaataataatttttttttgtttggtatgtatttataattaagtttttttacgttgtagagttgtgagatattattttgttatattatttttttttttattttttgtttttatgggtgggatggtgatttttttttttgattatagatattaaagttgttttaatcgtgttttttttttgtagatttttgggggagttatggatttttaattatatttaaatagtggaggttttcgttttgggatatttttattgtatttttataggtaagattcgatgtttgtggattatagaagtatttggagatgtgtttcggggagagggaaggggaagatatagttttagggtattagaagttagtggatttaaggtattgttaggattttggttttttaatagtttttttttttataatttatttttagattatagtttttatatttatttttcggtttagttttttttttagtattgttttttggggtagtttttaagggttagtttttggatttttttataatgtaagttatagagttggggaagttgtcggttggaggagttttttattttttatttttttttttttatttttcggttttttgttttagttttttgtttgatatatcgttgttttaggtaagaggggggtaggtattagatattgggggatagggtagggagaatgattttgtgggggttgatatatttttttttgtttttcgataggtacgttaggatttgttatttttttcggatttttattttatttttttgtagtttggtggttaaagtggttttttttttttaggggtttttgtttagtaggtatattgtatttttatattttttttttatttgatttttttgtttagttgttggttttgattttttttggttttttgatatttttttttgtttttaatatgtatatttaaattttttgttatagatgtttttatttatggtagatttatagttgtttgtggtgaattttggttttttgtcgttagtattattttttgttttattttttttttttttgttatttgtgggttttgttttgtagttttttagtttggttgtgcggtttttatttgtttttgttattcgggtgttgtttttatttgttaggttttttttcgttagtttggggcgagtagaggtaaggtataggaattgaggggttagggagcgttaagatttgggagtagggattttgtattttaaggtaggtagtttatgatttttttttttttagttgtatttagtggaattaaagtcgttttaggattattaaaaattgagtagtaattttgggggatttggattattacggatttttttaattggaaggtgaaacggaatagggatgtggattttttaagtgtttttttattttggaattagggtttggattttaggtttgttttagacgtttttttttttttaggtttttttttggttttaattttcgttttaaggttacgttttttatttatagtggagtttttcgtatttagcgcgtcgatttttattagtaggtgaaggagaaatttttgtggttttaattttaaattcgagttgttatttgattttttgtttttttattttatcgttgattttttattgtgatttattgtttaatatatgtttgttttttaggtttttttattagatgttttgcgttggatatttaagttttgggagcggatagggttgttatttcgagaagggttttttcgacg

SEQ ID NO: 66 - DNA, 2500 bp, Artificial Sequence
  chemically treated genomic DNA (Homo sapiens)
cgtcgggagggtttttttcgaggtggtagttttgttcgtttttaaggtttaggtatttagcgtagggtatttggtggggaggtttaggggataggtatgtgttaaatagtgagttatagtgagaggttagcgatgagatggaaggataggaaattaggtggtaattcgaatttagagttggggttataagggttttttttttatttgttggtaaaggtcgacgcgttgggtgcggaagattttattgtaggtggaaggcgtggttttgagacgggaattgaggttagagaaggatttaagggaagaagggcgtttaaggtaagtttaggatttagattttggttttaaagtaaggaagtatttggaaagtttatatttttatttcgttttattttttagttgggggagttcgtgatgatttaggttttttaaggttgttgtttagtttttgataattttggaacggttttagttttattggatgtagttgaggggaaaaaaattatgagttgtttattttgaaatatagaatttttatttttaagttttggcgttttttagttttttagtttttgtattttatttttgttcgttttaagttagcggggaagggtttggtaggtgaaggtagtattcgagtagtaggagtaggtgggggtcgtatagttaggttggggggttgtagagtagggtttataggtaatagagaaaggggaggtggggtaggaggtggtgttggcggtagggagttaaagtttattataggtagttgtgagtttattatgggtagaagtatttgtaataagaaatttgggtgtgtatgttgggggtagggaggaatgttagaaaattagggaaaattaaagttagtaattggatagagaaattaaatgaaggggaagtgtgaagatataatatatttgttgggtaggagtttttgaagggagaaagttattttggttattaggttgtagaggagtagaataaaaattcgaaggggatggtagattttggcgtatttgtcgggaaatagggagaaatatattaatttttataaaattattttttttattttattttttaatatttaatatttgttttttttttatttgaagtaacgatgtgttaggtaaaggattggggtagaaagtcggagagtagaggaaggaaggtggagggtagagaatttttttagtcggtaatttttttagttttgtagtttgtattgtggagaaatttagaaattggtttttgagagttattttagagagtagtgttgagggaggggttgggtcggggggtaggtataggggttgtgatttgaaaataaattgtggggagaaaagttgttaggaagttagagttttagtaatgttttaagtttattagtttttagtattttagaattgtgtttttttttttttttttttcgaaatatatttttaagtatttttgtgatttataggtatcgagttttatttgtaagggtgtagtgagggtgttttagggcggaagtttttattgtttggatgtaattgagagtttatggtttttttagagatttgtaggagaggagtacggttgaaatagttttagtatttgtggttaagaaaaaagattattattttatttatagaagtaaaaagtagggagaaaaatgatgtgataaagtggtattttataattttgtaacgtagaaaggtttgattataaatatatattaggtagaaaaaaattattatttattgaaggggttatgtaatgggaagcggggtttatttgagaattggaaggtttagtattgttatagaaaattttaggatataggcgttggtttgaggagttgggtttcgggatatagtgtttagaatttaggtttttggattgtggtttagtagaggtagtagtattgggaagtagtttttagtttcgtgatataggaatggtttgggaaggagaggtttcgtggagagggatgtttggtattttggacgttttggttatttttagtaattttttttagaaattttgggtttttttattaaatttttatttttatttattttagtgattgatgttgttagttttttttttgtttttaagttgttttttattattaggcgtaagtttgagttttgtgattataagaaggtaggagatattgtttcgtgatagatatgtgttttttatgttttatttttagttttttttttttttttatttaatttaggatatttagatttagtttatatagattttgttattagtgttaaattggattgggggattaggtcgatgggatggtcgaatggggttaggttttgtgtttcggtttgtatgttgtgatcgttttgtgttaatggggttagggggtagaggttgttttcggggtagtttttggattgggtatatagtaaagtgtattgggggagggaaagggaaatttaaattggaatgtttagaatatatacgtagagagaaaaagtagaaaaaggtaggg

SEQ ID NO: 67 - DNA, 2500 bp, Artificial Sequence
  chemically treated genomic DNA (Homo sapiens)
tttttttttttttttttgagagatatagtttcgttcgtttcgtcgtttaggttggagtgcggtcgtaagattacggtttattatagcgtcgatttttttggttgaagcgatttttttattttatttttttcggtagttgggattacgggcgcgcgttattattttcggttaatattttttatttttatttttatttttagagatgaggttttggtgtgttgcgtaggttggtttttaattttttagtttaagtaatttttttttagtttttttagagtgttgagattataggcgtgagttattatgttcggttttttttattttttgaatttttttttagtcgtttaattaatagagggggtcgggtgtagtggtttatatttgtaattttagtatttcgggaggttgaggtaggaggattatttgagtttaggagttcgagattagtttgggtaatatggcgaaattttcgttttataaaaaaattaaaaattagttgagcgtggtagtgtgtatttgtgtttttagttatttaggagtttgaggtgggaggattttttgagtttaagagggatagagtgaaattttgtttgtaaaaaaaaataaaaaattttatttaggatgatgaagatggggtgaagttatgaggaagaaagagaatgaatgttggttagttggtttaaaattaagtaattgtgttcgggtgcggtggtttatgtttgtaattttagtattttgggaggttgaggtgagtggattatgaggttaggagtttgagattagtttggttaatatggtgaaattttatttttattaaaaatataaaaatagtcgggcgtggtggtatgtgtttgtaattttagttatttgggaggttgaggtaggagaattgtttgaatttgggaggcggaggttgaagtgagtcgagattacgttattgtttgatagtggggtcgggtcgcgggggtaggaaagattaagtaattgtttaaattaggaatagagttaagtgggagggtagagattaggagttgtttagatttttttatttttttttttattgataggtattacgaaaggtagtggtagaaaagttagttcgggtagtagagcgagaggttcgggttttgttggagaagaatcgattttataggttattggaagatagtgaagagagtagtgaggagattgtgagtagggttggaagtagtttttagaagaaacgtaaaaagcggaaatattttaggaagaagcgtgaggaagaagaggaggaagaggtttttgagaaagggaagaagaaaatagggtaagttagaagtagggtgagagaggatggggtaggttgaagtgttttttatgtttttatttaattttttggatgggttgtagggggagtaaatagtagatagagaagttagagtcggaagatgagtgggaacggatagagcgtgaacgtttttaggatttggaggagcgtgatgtttttgttgagcgggttcgatagcgggataaggatcggattcgaaatgttttggaacggttagataagaaggtgaataggagtagtatgttttgtaaatttttaagattttagggtgaaatttgaggttggttgtgagtgtagagatagtgatttttgggaagataaggggttgtttttagtgagatgtttatttttgtggtgagagaagttttgtgtattttgtggttaagataattgtttgttgtatttgtaattagagagattttttattgagaggggatattttttgtgttagggcgtatttgaatgatttttgtgattttagaggggagtagttgttagtgtgggggttttttggttttatatttttttatttttgtttttttttttaggtttatgaagaggtttagaagcgttttaagatggtcgaggaagatcggaaggttatggtgagttttagggtttagggagttaagattagaagataaaaggaaagattttttgatagagtgtatagggagagaggatatagaggaagtatagtgtggatgttgatggggtggttaggtttttagaagaggggtttggttgttaggagttagttgaggatagatttatgttgttgagggaaggattttttttaagttgtagggggaaggaggttatttataagttttttttgatttttaattttaggattaaatatattttattagtgaatgaaattgtgagttttttttatttttgagttttaatgagatatgaggtagttggaatgttgttaagaaggttgttggagggtaagggtagggtagtagttttattgtatagggatgtgttgattatttagtttaggtatattatttttaaatatttttttattatttaatttttgtattttttatgtggttttgtgatttttttgtgtttttttattggatagggatagagtttttgtaatttataaattggattttttatggtgtgaaattaggtagggtaagttgttttttaaag

SEQ ID NO: 68 - DNA, 2500 bp, Artificial Sequence
  chemically treated genomic DNA (Homo sapiens)
ttttggaaaatagtttattttatttagttttatattataaaaagtttagtttatgaattataagggttttgtttttgtttagtgagaagatatagggagattataaagttatataaggggtgtaggaattaggtggtgggaaggtatttggagatggtgtgtttaagttgaatggttagtatatttttgtatagtgggattgttgttttgtttttgttttttagtaatttttttgataatattttagttgttttatattttattaggatttaggaatagggaaagtttataattttatttattaatagagtatatttgattttaaagttaagagttaaggaggatttatgggtagtttttttttttttataatttaagaaggattttttttttaataatataagtttatttttagttggtttttaataattaagttttttttttagaaatttgattattttattagtatttatattgtgttttttttgtattttttttttttatatattttattagaaagtttttttttttgttttttgattttggttttttaggttttgggatttattatggtttttcggtttttttcggttattttgaggcgtttttgagtttttttataagtttagaagaaaaaataagaatggaggggtgtgaggttaaagagtttttatattgatagttgtttttttttagaattataaggattatttagatgcgttttaatataaaaaatgtttttttttagtgaggaatttttttgattgtaggtatagtagatagttgttttagttataggatgtatagggttttttttattatagaggtgaatattttattagagatagttttttgtttttttagagattattatttttgtatttatagttaattttagattttattttgggattttggggatttatagaatatgttgtttttatttatttttttgtttgatcgttttaggatatttcgagttcgatttttgtttcgttgtcgaattcgtttagtaaaggtattacgtttttttaggttttgaaggcgtttacgttttgttcgtttttatttatttttcgattttggtttttttgtttgttgtttattttttttgtagtttatttaggggattaaataagggtatagagaatattttagtttgttttatttttttttattttgtttttgatttattttgtttttttttttttttttttagaagttttttttttttttttttttttacgtttttttttgaggtgttttcgttttttacgttttttttggaggttgtttttagttttatttatagtttttttattgttttttttattgttttttagtaatttataagatcggtttttttttagtagggttcgggtttttcgttttgttgttcgagttggtttttttattattgtttttcgtggtatttgttagtagaggggaagataaggaggtttgagtaatttttgatttttgtttttttatttagttttgtttttaatttaagtaattatttagttttttttgttttcgcggttcggttttattgttaggtaatggcgtgatttcggtttattttaattttcgttttttaggtttaagtaatttttttgttttagttttttaagtagttgagattataggtatatgttattacgttcgattatttttgtatttttagtagagatgaggttttattatgttggttaggttggttttaaatttttgattttatgatttatttattttagttttttaaagtgttgggattataggtatgagttatcgtattcgggtataattatttagttttaaattagttaattagtatttatttttttttttttttatggttttattttatttttattattttgaatggggttttttatttttttttatagatagggttttattttgttttttttgggtttaagggatttttttattttaggtttttaagtagttagaaatataggtgtatattattacgtttaattaatttttaatttttttgtaggacgaaggtttcgttatgttgtttaggttggtttcgaatttttgggtttaagtaatttttttgttttagtttttcggggtgttgggattataggtgtgagttattgtattcggttttttttgttaattaaacgattgaaaggaagtttagaagatgaggggggtcgggtatggtggtttacgtttgtaattttagtattttgagggggttgagagaggattgtttgagttgaggagttagagattagtttgcgtaatatattaaggttttatttttaaaaataaaaataaaaataaaagatattagtcgggggtggtggcgcgcgttcgtagttttagttatcggggaagatgaggtgggagggtcgttttaattagggaggtcgacgttgtagtgagtcgtgattttacgatcgtattttagtttgggcgacggggcgagcgagattgtgttttttaaaaaaaaaaaaaagaa

SEQ ID NO: 69 - DNA, 2500 bp, Artificial Sequence
  chemically treated genomic DNA (Homo sapiens)
tgggtttttaggtagttttggaagttaagagaatatttagaaatggggagggagaagtagtggaaatttatatgggttgaggagtaggtaagatgttgtttttgtgggattgggaatgtgttgttttttagtgatatggtttttgagattaggagggatatatttaaggtagttttttttttttgatgatttttatttgttttttttttttaaagtaatttattgtttaagattatatgattttgagaatggggaatattggttttggtttttttattataatgtgagtgatgagatttttttttattgttatgatggttatattttttggggttttgttaattgtatttgttaagtgaatggttggtggagtgggtagatagtgatttgtgataatggaggtgagaagtattttttttttttatattgttgtttttttgatggtgtttagtttgaggagtgggtatttggttttggatattgtaatttttgttttttattttgtttatggggttttaggttttagtgtttattttgatgttttatatttttgtagtggggtattgttttaatttgggtatttttattggtataaggaaggtgggtagttagtattgttttgaagatagtgttatttattattgtagttgggggtttattttgtgtggtttttagtggtgaatgtgttaggaaggtggtttttggagtgggatggagtttttttgttaaggtgatttttgatttgtatttttaggttagattttggttttttattttattgttttttttttttattttaattttgttttttttttattttgtttaaatttttttgtataattattttatttttgagttttttatattttggaaatttatgattttttgtttttttggttattgtatttttgatatttttagatatttgattttatttttgatttttttagatttttttatgtatgatattttttaagaggtggttgaagtttttttgttttttttgatagagattatagaaggagttgatgttgaggatgggtatggtttaggtttgaagatagagaagggaggtagggtagggaattgggggaaaatggagaagggatagaattgttaatgttggagtttgagttatttttttggtatttaggggaataatagaagtggaagattgttttggattttttaggttttatgaatatttatttggtgttagatggattagatagtattggggttagtaattttataggagttaaaaagtgtttagttaatttaattgagaaggtggaatttttttatttttgaatttgggggaatggaattttgttgattttttaggattagttttttgattattttagtttttttgaataatagggttttaggaaaatttttaggttttattttgtttttttttttttttatttgaagtagttttttgattggtaatttttttatgaattttagtttttgagttttttattgagggtttttttgttttagtaaagttgttgaaattttttaattatagtattttatttttaatgttatggtgttttgttttttttatttataggtggtaagttatggtgtgaagttaagatatggtttagtgatatatgttatatattttaaaatttgggttaaagtgtttgaagtagatagtagtaatgtagattgggttatgaagtagtttaatgaaattaattatgaaggttagaggttagggaatggtgggaggtttattttggggttaggaggtttagggtggagggggttatgagattattttgagggtgatagggaggattattttgtagttaaaggttgaatagtaggattgttgggtaatggaggttagtgggaatttgttgggggttggaagggttattttgtggttaaagggaagtttgtgtaatgatgattaatttaaaaagttgaaagatgtgggattttagttgtagattggtttttggggttaaaagatggtttggaagattaggtgaggtgatggttttttttttttttatagattataagttgaagttagggattaatattaagaaggttttttaggtagtgtatagtatgatgagttggttagatgatgttttttttgaaggttggaattgtatttgttatgttattatttttatgattgatggttagaagggattttttttttgttttagtttttttatttttttagattagtatgtggtttttaagtttatttgtaatattatatttatggttggggttttgaatgtgatttatagttggttgtttattttttttgtgattttttataaggaattttttttaagttttgtgattaattatttttaatttttttttaatttgtttattttgttatgtgtatttttgtttttagttagtttattttttttattttttatttttatggttttgttttttttgtaggattgtataatatgggtggggatttaattattgttattgatgagatttg

SEQ ID NO: 70 - DNA, 2500 bp, Artificial Sequence
  chemically treated genomic DNA (Homo sapiens)
tggattttattaatgatagtaattgggtttttgtttatgttgtgtaattttgtagaagagataggattatgagggtaggagataaggaagataaattggttaaaggtagggatatatgtggtagggtgagtaagttgaggaagggttagagatagttgattatagggtttaggaagaattttttatgaagggttataggagagatgaatagttagttatgagttatatttagggttttaattatgggtatagtgttataagtggatttaagggttatatgttggtttgagaaggtggggaggttgggataggagagaggttttttttgattattagttatgaggatgatgatatggtgggtgtggttttagtttttaggagggatgttatttggttagtttattatgttgtatattgtttggagggtttttttggtgttagtttttgattttaatttgtggtttgtggagagggaagagattattattttatttggttttttaagttattttttaattttagagattaatttgtaattgaaattttatattttttaattttttaagttaattattattatatggatttttttttgattataaagtggtttttttagtttttaataggtttttattaatttttattgtttaatgattttgttgtttaatttttgattataaagtggttttttttgttgtttttaaggtagttttatgattttttttattttgaattttttgattttaaagtgaattttttattattttttaatttttgatttttataattgattttattgagttgttttgtgatttagtttgtattattgttgtttgttttagatattttgatttaaattttggggtatgtggtatatgttattagattatattttggttttatattataatttgttatttgtgggtgaggagaataaggtgttatggtattgaaaatagaatattgtgattgggagattttagtgattttgttgggatagggaggtttttagtaagaggtttaagggttgaggtttatggaggaattattagttaagaaattgttttaagtaaaagggaaggaggatagaataggatttggagatttttttggggttttgttgtttagaggggttggaatgattagggagttagttttggaagattagtgagattttatttttttgagtttagggataggaggattttatttttttaattaagttgattagatattttttggtttttgtgaagttgttggttttaatgttgtttgatttatttagtattaggtagatgtttatggagtttgaagggtttaggatgattttttgtttttgttgtttttttgggtgttaggagagtggtttaggttttagtattaatagttttgttttttttttatttttttttagttttttgttttgttttttttttttgtttttaaatttgggttgtgtttatttttagtattgattttttttatggtttttgttagggaagataggaaagttttggttattttttgaggggtgttgtatatgaaggagtttgggagagttagaaatgaggttaaatgtttgggagtgttagggatatagtgattaaagagatgggggattatgggtttttagggtataaaaggtttagaagtgagatagttgtatagggaggtttaaataaagtgaggaaagagtagggttgaggtggggagagaagatagtaggatggaagattaggatttgatttgggggtataggttaaaggttattttggtaggaaggttttgttttgttttaagagttatttttttgatatgtttgttgttgggagttatgtagggtaagtttttggttgtagtggtaggtgatgttgtttttaaggtggtattggttgtttattttttttgtgttaatggggatgtttgggttggagtagtattttgttgtagaggtatgagatattgaggtaagtattgaagtttgaggttttgtgagtaaggtagagagtaagagttatagtgtttggagttgagtgtttattttttgggttgggtgttgttagggagatagtaatgtagggggaggggatgttttttatttttgttgttatagattgttgtttgtttattttattggttatttatttggtaggtgtgattggtagagttttggagagtgtaattgttatagtagtggaaagagattttattatttatattgtagtagggagattggggttagtattttttgtttttgaagttgtgtggttttggatagtggattgttttgagaaggggggataagtagaagttattaagagggaaaggttgttttaggtgtattttttttggttttggagattatgttattgagaaatagtgtatttttagttttgtagaagtagtattttatttattttttaatttatatggatttttattgtttttttttttttatttttgagtgtttttttgatttttagggttgtttggaagttta

SEQ ID NO: 71 - DNA, 2500 bp, Artificial Sequence
  chemically treated genomic DNA (Homo sapiens)
tggaggtgagggttttaggttggggatgttgggatttttttgtgatagtttttagaatgttttttttttttttttaggtttggttgttttttttttttgatgtgggttatttttttttttaagttttataaatttgttaggtgtttttgggtttgtttattttttttttgttgttattgagatggagttttgttttgttttttaggttggagtgtagtggtatgattttagtttattgtaatttttgttttttgggtttaagtgatttttttattttagttttttgagtagttgagattataggtgtttattattatattagttaatttttgtatttttagtagagatgggattttgttatgttggttaggatggttttgaatttttgattttaagtgatttgtttgttttaattttttaaagtgttgagattataggtgtgagttattgtatttatttgggtttgtttattttatttttttttttggttttatttttgttgtagtggataagttgtgttgaggttgttttttaagaaaaaattatgttttttaatttgatagatgttagggaggtggtgatagattagtttttatgtagtgggatttaggaggatgagagtttttgtaagggtgagttttttattatgtttggatttttaaggggaaggttatttgtgtttttgtggttagtatgtatgttagaatattagtttattgttttagatgatattgttttttgttattttttgttggtaggagaatttgggggagtagttttttttgagtggagatttaggtttttttaggtgagaaggtagaagtttgtaggatttaggggttataggattttagttttgttggggggatgagggaggtttttgagggatttagggaggttggggtttatagttggggttgtggtagttttttagttagttttttttttttttttaggtgggtttggtgagttggggtttttataatttttgttttggttttgttgataaaaatttttgtaaaagggttttttgtagtaaggttttgttgttatgagatttttatattaattttttttgtatgtagttttggttgaggtagtatttgggggatgttttgaattttttatttttttagttatggttattgagttttttgttgttttgttagaatttgttgtttttttattttttatttttgaatggttatttttagattttgtgatttatttttttttttagttgagtaaatttgggtttttaggatgttagaggtagtgtatataagttgggaaatttttagggtttttattagtaggattgttttgttgttttattttttgttttttggtttgtttttagattttttttttggttgatttgatttatgtttgttttatttttatatggaattttttagttatgaaattaataaaaattaatggtttttatattttttagtgtttttatttggaggttaggtagggttggttttgggggagggggaggttagaatgattttaagagttataggaaggtaggttagagattttattggataaatagtggttggattttgtattataatatataattaataggggagtgagttggatttttatttttggtttttaagtgggtggtttgggtttattggggaggagttaaggttggagaggaggtattgaaggggagagttttggatttttggtagtaaagggtgggatttttgtagtttttgtttttttgattggtagtttagtggggtttttttgtttggatgttttgggaaagtgatgtgggtaggataggtggggtgagttgtaggtgttagaatatagattgtataaaaggttgggggttggtggggagtaggggaagggaatgtgattaggtttaggtttggagttttagtttggatattgagttaagtagataagtaaagtaagttaggatatattattttgttttaggtttagttttttttttgttttttaatgttatggggagtaattttagtttttaattttgtttgatgttttttattttgggttttttgtttggaggtaagtgagggtaattttttttttttgttgtttttagtatttttttttggttttttggggttaggttttattagtttttttttttaggtgtgattattattttatggtttttggtttagttttagggattttgttttttggagggggtagagattaaaggtggttttttttgatttttttaagagggttaggtattggagtatgtgtgtttttttggtttttatttgtattttgtgtagatatgtatttgtagatttatggggttttggagtattttgaagatttaagattaaaagattgttaggaaggtagagtgtagaggtttgagggtaatgagtgtgggtagtggtttaaggtagaaatagggtaggtggtagtaaggttaggattaggatgagattaggtagggtgataaggtgggttgattgggagtagg

SEQ ID NO: 72 - DNA, 2500 bp, Artificial Sequence
  chemically treated genomic DNA (Homo sapiens)
tttatttttggttagtttattttgttattttgtttagttttattttagttttgattttgttgttgtttgttttgtttttgttttaggttattgtttatatttattgtttttaaatttttgtattttgtttttttgatagttttttggttttgagtttttagggtgttttaggattttgtagatttgtaggtatgtgtttgtatagggtatgggtagaagttagaaggatatatgtattttagtgtttggtttttttggagaagttggaaggagttgtttttgatttttattttttttagagagtaggatttttggggttgggttaaagattatggagtggtggttatatttgaagagaaaggttgatgaagtttggttttaaaaggttaaggagggatgttggagatagtaggaagggaaggttatttttgtttatttttagataagaggtttaagataaagggtattaggtagagttgggggttgagattgttttttatggtgttggaaggtaggagagaagttgggtttggggtaggatggtgtgttttggtttgttttgtttgtttgtttggtttagtgtttaagttgaaattttagatttagatttggttatattttttttttttgttttttattagtttttagttttttatataatttgtgttttggtatttgtggtttgttttgtttgttttatttatattatttttttggaatatttaagtgggagggttttgttgagttgttagttaaggaaatagaaattgtagaagttttattttttgttgttaaaggtttaggatttttttttttagtattttttttttggttttagtttttttttagtaagtttaaattatttatttagggattagaaataaggatttagtttatttttttgttgattgtgtgttatggtgtagagtttagttattgtttgtttagtggggtttttgatttgtttttttgtagtttttggagttattttggttttttttttttttaaggttagttttatttggtttttagatagaggtattgagagatgtggaaattattgatttttattaattttataattgggaaattttatgtgaaagtgaaataagtatgagttaagttaattagggaaggaatttggggataggttaaggagtgggaggtggggtagtgaggtagttttgttggtaggagttttgaggattttttagtttgtgtgtgttgtttttggtattttagagatttggatttatttagttaggagagaggatggattatagggtttaagggtggttatttagaggtagaagatggaggggtggtagattttggtagggtagtagagggtttagtggttatggttagaggggtaaaaaatttaggatattttttaggtgttgttttagttagggttgtatgtggaagagattgatgtgaaagttttgtggtggtgggattttgttatgaggggtttttttgtgggagtttttgttagtagagttaaggtaggggttgtaaagattttagtttattagatttatttggagaaaaggagagaattggttgggaggttgttatagttttaattgtaagttttaatttttttagattttttaaaggttttttttatttttttaataaggttgagattttgtaatttttgggttttgtaagtttttatttttttatttgaaaaaatttgaatttttgtttaaggaaaattgtttttttagatttttttgttagtaaagggtgataggagatagtgttatttagggtagtggattggtgttttggtatgtatgttggttatagagatataggtggttttttttttgggaatttaggtatggtgagggatttatttttgtagggatttttatttttttgggttttattgtataggaattggtttgttattatttttttgatatttgttaagttggggaatatggtttttttttgggagataattttggtatagtttgtttattgtagtaggggtggaattagagagaagggtagaataagtagatttgggtgggtgtagtggtttatgtttgtaattttagtattttgggaggttgaggtaggtagattatttgaggttaggagtttaagattattttggttaatatggtgaaattttgtttttattaaaaatataaaaattagttggtgtggtggtgggtatttgtaattttagttatttgggaggttgaagtaggagaattgtttgaatttaggaggtagaagttgtagtgagttgaggttgtgttattgtattttagtttgggagatagagtaagattttattttaataataataaaaaaagaataagtagatttagggatatttagtaggtttgtgaggtttgggaggaggggtgatttgtgttagagagagaaagtagttagatttggagaaggaagagagatattttgggagttgttatagggggattttagtatttttaatttgagatttttattttta

SEQ ID NO: 73 - DNA, 2500 bp, Artificial Sequence
  chemically treated genomic DNA (Homo sapiens)
tttgagtggatatagtatatgttttagagagtatagggttgggggtaaggttattgattaataggattttaaggtagaagaattttttttagtatagaataaaatgaaaagttttttaggtttatttttttttatatagatatggtaattatttgattttttaattttttttttattttttttttttttttattttataaaattgttattgttattatggtttttttttaatgagttgttgggtatattttttagatggggtggtggttgggtagaggggttttttattttttagtaggtgtggttgggtagaggtgttttttattttttggatagggtggttggttgggtggggggttgatttttttattttttttttggatggggtggttggttgggtggggggttgatttttttattttttttttggatggggtggttggttgggtggggggttgatttttttattttttttttggatagagtggttggttgggtaaagtggttttttattttttagtaggggtggttgggtagaggtgttttttattttttggatggggtggttggttgggttgggggttgatttttttattttttttttggatggggtggttggttgggtggggggttgatttttttattttttttttggattaggtggttgttgggtggaggggttttttattttttagatagggtggttgttgggtggaggggttttttattttttagatggagtggttgttaggtagagggtttttttattttttagatggggtggttgggtagtgatgttttttatattttggatggggtggttgggtagaggtgttttttatattttagatgatgggtggtagggtagagatgttttttatattttagatgatgggtggttaggtggagatattttttattttttagatggggtggtggttgggtagaggttgtaattttggtattttgggaggttaaggtaggttgttgggaggtggaggttgtagtgagttgagattatgttattgtattttagtttgggtattattgagtattgagtgaatgagattttgtttgtaattttagtattttgggaggttgaggttggtggattatttgtggttaggagttggagattagtttggttaatatagtgaaattttgtttttattaataaaatatgaaaattagttaggtgtggtggtgtgtgtttgtaattgtaggtatttggtaagttgaggtaggagaattaggtagggaggttgtagtgagttgagatggtagtagtattgtttagttttggtttggtattagagggagattgtggaaagagagggagagggagattatggggagagggtgagggagagggagttttaggaatatttttgtatgtgattttggtatatgtatgtatttgttttttttgagtaaatgatttaaatgtggaattgttatattataggttggtatatgtttagttgtagtagaggttgagaaagttttatttatgtatatgttagtaaggtaatagagtgttagttgttttgtattttttttaatatttggaattatttgttgttttagtgttagttgttttgatgggtgtgtagggatgttttattgtggtttatgaaatataaatgttttttgaaggagtggagggattattagttgattttttttttgggtttttgggggttttgggatagatatgggtgtatttttgggttggaattgggaagtttttgttggtaattgaggttgttgaggaggtagagtttgatgggagggggttatttatttttgtttttttttgtttatttgtagttggttattgttttaatttaggtattttattgggtgtagtgtggataggtttttgttttggttatggggataaggtttgttattgttgttttttgaattttgtgtttatggggtttttggagtgggagtgttagggtaatggggtttggagtggaatggagtttatttgttgttgtgagtagttgttttgtttttttgagattttttggtatatttggttattgttttggttgatttttgtgtggttttttttatagaattttatttttatgatttttttgaggatgtggtttttgttttgggtattttttttttttatatgtttggggttattaattttatttagaagataaagggtgagtgtttgaggtggggtttttggttgagtagggtgttggatttgggttggagtaagggaggatgtaatttttttggaggttaggagttttggtgggtttagttattgaaagggagggaggtagagaagttggatttgtttggtgagagtgtaggaaggaggtggggatttgaattttttttttttatatttttttagaaagtttgggttgtaaaatttaaatttagtgttttggttatttgaatttttatttgtttttggattgtttgtagagtgtgttggaaaatgatttttttatttttaaggagagtg

SEQ ID NO: 74 - DNA, 2500 bp, Artificial Sequence
  chemically treated genomic DNA (Homo sapiens)
tgttttttttgaagatgagaaagttattttttgatatattttgtgaatagtttaggagtaggtagaggtttagatgattagagtgttggatttggattttatggtttaggttttttggagaaatgtggaaggggaggatttagatttttattttttttttgtgtttttgttaagtaggtttagtttttttgttttttttttttttagtggttgagtttattaaggtttttggtttttaggaaggttgtatttttttttgttttggtttagatttagtattttgtttaattagaaattttattttaaatatttattttttgttttttgggtgggattggtggttttaagtatgtgggagaaggaagtgtttagggtaggggttatgtttttagggaagttataagagtagggttttgtggggagagttatataggagttagttggggtagtggttgggtgtgttgaggaattttaggagggtagggtagttatttatggtggtagatgggttttgttttattttagattttgttgttttggtatttttgttttgaagattttgtgagtataagatttgaggagtagtgatagtggattttgtttttatgattaaagtggaagtttgtttgtattgtgtttagtgaaatgtttgggttggggtagtggttagttgtgagtgaataaaggaaggtagaggtgagtagtttttttttattaggttttgtttttttagtggttttagttgttagtagaagttttttagttttaatttagggatgtatttatgtttgttttagagtttttagagatttagggaagaagttagttgatggtttttttatttttttagagaatatttatattttataaattatagtgaggtatttttatatatttattaaaatggttaatattgaaataataggtaattttaagtgttggagaggatgtagagtgattggtattttgttattttgttggtatgtatgtgggtgaaatttttttagtttttattataattaaatatatgttagtttgtgatgtgataattttatatttagattatttatttaagagaagtaagtgtatatatgtattaaaattatatgtaagaatgtttttagagtttttttttttttattttttttttatggtttttttttttttttttttttatggtttttttttgatgttgagttgaagttggatggtattgttgttattttggtttattgtaatttttttgtttgatttttttgttttagtttgttgagtgtttgtgattgtaggtgtgtgttgttatgtttgattggtttttgtattttgttagtggagatggggttttgttgtgttggttgggttggtttttagtttttaattgtgagtgatttattagttttggttttttgaggtgttgggattgtagatggagttttgtttatttagtgtttaatgatgtttaggttggagtgtagtggtgtgattttggtttgttataatttttattttttagtagtttgttttggttttttaaagtgttgagattgtagtttttgtttggttgttattttgtttgggaagtgaggagtgtttttgtttggttatttattgtttgggatgtgaggagtgtttttgttttgttgtttattgtttgagatgtggggagtatttttgtttggttgttttgtttgggatgtgaggagtgttgttgtttggttgttttgtttgagaagtgaggagattttttgtttggtaattgttttatttgagaagtgaggagtttttttgtttggtagttgttttgtttgagaagtgaggagtttttttgtttagtagttatttggtttgggagggaggtgggggggttagttttttgtttggttagttgttttgtttgggagggaggtgggggggttagtttttagtttggttagttgttttgtttgggaagtgaggggtgtttttgtttggttgtttttattgggaagtgaggagttattttgtttggttagttattttgtttgggagggaggtgggggggttagttttttgtttggttagttgttttgtttgggagggaggtggggggattagttttttgtttagttagttgttttgtttgggagggaggtgggggggttagttttttgtttggttagttgttttgtttgggaggtgaggggtgtttttgtttggttgtgtttattggaaagtgaggagtttttttgtttggttattattttgtttgggaggtgtgtttaatagtttattgagaaggggttatgatgataatggtggttttgtggaatagaaaggggggaaaggtggggaaaagattgagaaattggatggttgttgtgtttgtgtagaaagaggtagatttgggagattttttattttgttttgtattaagaaaaatttttttgttttgggattttgttgattggtgattttatttttaattttgtgttttttgaaatatgtgttgtatttatttagg

SEQ ID NO: 75 - DNA, 2500 bp, Artificial Sequence
  chemically treated genomic DNA (Homo sapiens)
tattatggagattatttagtggttaattttttgtgagtggatgtttaggttggggtttgtgagggtaaggtgattggggttaggagagatggtatttgtgttgagggggttgaggatagggtgattgttaatagggtatggatttagtttgggggtagtgaggatattgggattgaaggaagtttttttattttgattgtttttatttgttgtttttgttagttggagtttagtgtggatggtgttaagtagtattggaatggggagtttgtgaagttttatttagaaattgattttttagttttggtggtgttgggagttttggatatagttttgtatgttgtaggtagtaagttttataagttttttaatatgggtaaggtttgtttagattttttttatagtttttttatttttttatggtttatttttttgtttttttgagttttgggtgtagtttttggattttattgaggttttttatagttttttttttatttggttttgtggtttttattttttggttttgtatttttttttatttttttatgtgttgtttttttatttgtgttgagtgtttagttttgttttttagttatatttggtttttagtatttttgttttttttgtaggtttttgaagttatgaatagttatgattttggttgtggttttgggggtggggatagtgttttttaggtgttttaggtagtgggtttggttttttttgatggagattagtggattttatttagaaagagtgagaatagagaaggaaggggagtgggtggtgggaagataaggaaggaggaagggtttgaggggattagttggaagagtttgggtaggaagggttgggtaggggaaggggaggaggggaggaggttgagtgtttgatggttggattgtagtttttttttttattaggattaagttgttttaaggagaagataatttggaaaaagagaaatgtgaatttttaaaaggtgattaatgagaaatgtgagttgtgggtgtttaggtagtagtttgggttttttatttgggatttgggttgggggtttgtttttttgttttttggttttttgttgaatttatgtgtggtatttggggttagagatttgaattttgggattatgagtggaaggtgggtagttttttttagtagttttttttatgttgttggttttaaggggttggggtgggggttgaggtgtatgttttttttgtttttttatgtttatttttatttggttttgtagtgggttagtatgtttttttgatagttaagtgttgttgttaggatggggtgatatgtttgtttatgatgtgtttttgtgagtagtgggtagtttgtgtgtagtagttggattgttgggagttttttttgttttgttgttaatttgttgagagtttgtgtaagaagagtagggataagggttaggtgggtttttaatgaggtgaggggttgggtggggttagggtataggtggtggtgtttggaaaggtagaatggttttttttttatttttgtttattgtggttttttagttttggagattttgtaggaggaggatttgattgatgaggatgatatttttgtgtgtagtttttttttagagaattggttttggagagtggaaatagtggattgtttttaaatgtgagagtgtgtgttggtttggttttttttttgtgttgtgttttggggttagttggggtagatgggttttttttgtttttttttatatagattgatattgtggttttttgattttttgattatgtgggagatttatggtttgagtttgtttaaaattaaaggtgatgttattttgtttgggttttaggtgattttgtttttatttttttgtattttagttttttgttttttttgtttttagtgtaggaagagggtttagtgatttggggaggtttgtgttagtgtgtagttggtgtgggttagagggtagaggtggattgagatagagttgggttatttttattttttttttttgtggttttgaagttttgatggtttttttgatttttgtttttgtgtttatgtttttttttttttaggtttatgtgtggttattttagtttagttttgggtgttttgtgagttttatttgtatttttgtttgtttatgtttgtttgttgttttgagtagttggagttgtggtttgttttttataattatttggataaaaatttgattgtgaggttttatgggagtttgagtatataggagttgggggagttagggtttagtgaggggtggggaggttaattgggttaggattttggttatttttgtttttttgtttttaggtgagtgtttatgtgtttttagtggaggggttgtgtttggttgggggtggagggttggtttagtaggtgttggtgtttgtgggttttgtttggtttgttgttttttttgtggtgtttatggtagttgttgttgtgtttttgaaggtggtggtttgagggttttttg

SEQ ID NO: 76 - DNA, 2500 bp, Artificial Sequence
  chemically treated genomic DNA (Homo sapiens)
tgaaggatttttgagttattatttttagagatatagtggtggttgttgtgggtattatagagaaggtaataggttgggtagagtttgtaggtattagtatttgttgggttagttttttgtttttagttaggtatagtttttttattggggatatgtggatgtttatttgagggtaggaaaatgaggatggttagagttttggtttggttagtttttttattttttattgggttttggtttttttaatttttgtatgtttaggtttttatggggttttatagttaggtttttatttaggtagttatagaggataggttgtagttttagttgtttaaagtggtggatagatatgggtaggtggaggtgtaggtggaatttgtggaatatttggagttggattggggtggttatatataggtttgagggaaaggaagtgtgggtataggggtagagattagaggggttattaaagttttagggttataggagggaggggtgggggtgatttagttttgttttagtttgtttttgttttttggtttatgttagttgtatgttggtatagatttttttagattattggattttttttttatattaagagtaaagggaatagggagttggggtatagggaaatggaagtggggttatttgaggtttagatagggtgatattatttttggttttggataggtttaggttatggattttttatgtggttagagagttggggagttatagtgttaatttgtgtagggaaaggtagagaaggtttgtttattttggttggttttgagatatagtatagagaaaaggttgggttggtatatatttttatatttgaaagtggtttattgtttttattttttagagttagttttttgggaagaagttgtgtatgggaatgttatttttattaattaggttttttttttgtaggatttttagggttgggggattatggtggatgggagtgaggaggggattgttttgtttttttaagtgttgttatttgtgttttagttttatttagttttttattttgttggaggtttgtttggtttttgtttttgttttttttgtgtagatttttagtaaattggtagtaggataggaagggtttttggtagtttggttgttgtatgtgggttgtttgttgtttgtaggaatgtattatgggtagatgtgttattttattttggtagtagtgtttggttgttggggaagtatattgatttattgtagggttaggtgggggtgagtatgagaggataaaaaggatatatattttagtttttgttttgattttttgagattagtaatataagagaggttgttggagagagttgtttattttttatttgtaattttggaatttggatttttggttttaaatattatatgtgggtttagtaaggagttgaggggtagagaggtagatttttaatttggattttaggtggagagtttaagttattgtttaggtatttgtaatttatattttttattaattgttttttggaagtttatgtttttttttttttgggttgttttttttttgggatagtttagttttggtagagagaaaggttgtagtttagttgttaggtatttggtttttttttttttttttttttttttgtttagttttttttgtttggatttttttagttggtttttttaggttttttttttttttttatttttttgttatttattttttttttttttttgtttttattttttttggataaggtttattggtttttattagaaaaggttaggtttgttgtttggaatatttgaagggtattgtttttatttttaggattatagttgaggttatagttgtttatagttttaaagatttgtaagaaaggtaggaatgttaggagttaagtgtggttgaggggtaggattgagtatttggtataggtgagagggtagtatatggggggataggaaaggatatagagttaggagatggagattatagggttaagtggggaagagattgtggggagttttagtgggatttaggggttgtgtttaaggtttagggaagtagggggatgagttatggaggggtgagagagttgtggagagggtttggataaattttgtttatgttgaggggtttgtgggatttgttgtttgtagtatatagagttgtgtttaaggtttttagtgttattagggttagggagttggtttttaagtggagttttatggattttttgttttggtattgtttggtattgtttatgttgagttttagttggtaggggtggtaggtgggggtggttagagtgggagagttttttttagttttggtatttttattgtttttaagttaaatttatgttttgttggtaattattttgtttttaatttttttggtataagtgttattttttttgattttggttattttgtttttgtaggttttagtttggatatttatttgtagggagttggttattgggtggtttttatggta

SEQ ID NO: 77 - DNA, 2500 bp, Artificial Sequence
  chemically treated genomic DNA (Homo sapiens)
gtggtaggagtgtagaagattttgatttttttttttggttttaagattgaatgtgtgttaggatatgtggttagggaagagaagttatttaattgaattagtaatagtagtaggaaaagaaaaagtggagggagggtagtttaggtagggggtttggaataagtaattgtattaatagaggtagttggtgtgagtatagaattattttaggttgggattttgttatttagttttttttgtatggttgtttgtgtttttggagatttgtgtaaatattaatggatgaggaggagagatggtttttagagtttagtttttatttttgttggttttttattgtttttaggtatttggtgaatgttggagtttttattgtttgagatgttgggagttggtggttagttgtgtttggagttgggagatttattaagtattttgttaaaggtattttatttgtagtttaagtttgtagttttttattttttggtggttttttaggtttttaggttttatttatttttttttttttttgtgttatttttttagggtgttaggttgtttttagtatggtttggaaggtaaagtattgggaattgtttttattagagtttttgggttggtgggtgtttgttgtggtgtggtttggttttatttattatgtgtatgattttattggggtttagttagtggattggtgagtttttttttggtttttggtagattatggagtaatgatttaaagtgggatttttttttagtttatgtttagttttttagtgaaggttagtggtttttatttttttttggaatttgggagtatttttttttaagttttaagttttttttatagtttgagtttaggtgtttggttttagttttgttttttttttgtatagtatttttattattttaggaatttttttttgtttgttagagatatgaagattttgtttattattgtttagttttttagagtgggttgggaggggattagaagagttgtatgatggtggttgagatagggttattttgggaaggtttgggagttaggatgagtgttgggtttttgtgtgtgtaaaaggttagatgtgattgttgttgtttgtttggtttttgatttagtggtggggtttgagtaatgtttttttgtttttttatggaaagtggaattagaaatggtgttaaggttgtggttgtttttttttgtgtaaaatggtgttgttattattttgttttgaaataggaaggtgggatttttggggaggttggtgaaggagggtagggtttttttttttatgtgttatgttaaaattgttaaataaagtatttttgtttgtgatattttttggatgttttttatttattgtgatgtgtgtttgggtgttttgtttaggggtagaggtgaagtttgagttttgttttatttagagaggaaaggggttaggggtttattttgatgtttaggttattttttttgtggagtggtgagggtgtatttaattttttaaattatggaatttttgttagggtttaaaaaagtaaaagtttagtatagtttaatttgtgttggaatgaaagtaagagataagtgttttagaagtttgttattgttttgtgagggtttttaaatattttgtatttgtgggttatgttgggtttttgtatgtttaggtatatatgagtttgtgtgtatttatattttgatatagatatatttggtagggggaggtgtttaggtattggaatgagaggagttaatggggaaggatagggttatttttgggttaagatttagagttttttatggatatttaggtgtttggggtgtttttataattttgggtttgaggttagttgtattttttggttgttatgtggttttttagtttagttgggttgggggaggagtaaggtttagagttaattttgttttgaggtttagtttggttagaaggtagtagatagatagatggatttaattttttttggattttttagttatgaggttgttttgggggttgatttgggtatttagtttttttattttatttttgtagaagtttaggttttggaggtgggatgttgggtgtttggattggggtagggttggtattgggatttgatttaggagtgagggagagtaggggtggaggtgttagagtgaagtttgattgttgattttgtttgttttttttaggttgtttttgttttttttttttgtggtttatttgggggtttttttattggtgggggtgtagttttaggatgtgttttgaggataggtagtgaaaggattagtgtttttgagaaatttattttgtaataatgttttttgttttttaaaggtggattttatttttagtttagaaagagattttgtattttttagtttttaggtaattagattttatgtttttttgttgtttgtgggggttttttgttttgtttttatttgttttgtaagtgttattatttttttattggttttttttttttttgt

SEQ ID NO: 78 - DNA, 2500 bp, Artificial Sequence
  chemically treated genomic DNA (Homo sapiens)
ataggaggggaggaggttagtgggaagatgatgatatttataagatagatgggaatagggtaggaggtttttataagtagtaggagggtatggggtttggttatttggagattgaggagtgtgaagtttttttttgagttaagggtgaagtttatttttggggagtaggggatattattatgagatgggttttttaggaatattgatttttttattatttgtttttggggtatattttggagttgtatttttattgatagggggatttttagatgaattatagaaggagagaataagagtaatttggggagaatagataggattagtagttagattttgttttgatatttttatttttgtttttttttatttttgaattgggttttgatgttagttttgttttaatttaagtatttagtattttgtttttaggatttgggtttttgtagagataaggtgaagaagttggatgtttagattagtttttagagtagttttatggttggaggatttaagagaggttagatttgtttgtttgtttgttattttttggttaagttaggttttggggtagagttgattttggattttgttttttttttagtttagttaagttgggaaattatgtgatagttaagaagtgtaattggttttaggtttagagttgtgggggtattttggatatttgggtgtttatgggaaattttgaattttggtttagaaataattttgtttttttttgttaattttttttattttagtgtttgagtatttttttttattaggtatatttgtattagggtataggtgtatataagtttatgtatatttgggtgtataagggtttaatatggtttatgagtataggatatttaaaggtttttataaaataatgataggtttttaagatatttgttttttatttttattttaatataaattgaattatattaggtttttgtttttttaggttttaatagaaattttgtggtttaggagattaggtatatttttattattttatagggagaatggtttgaatgttagagtgaatttttgattttttttttttttgaatgaggtaaagtttagattttatttttatttttaaataaggtatttaaatatatgttatagtaaataaaggatatttagaaaatattataggtagaggtattttatttggtaattttaatatgatatgtagagaaaagaattttgtttttttttattagtttttttagaaattttatttttttattttaagatagagtaataatagtattattttatatgaaagggaatagttatagttttggtattatttttggttttattttttatggaagggtagagaagtattgtttaaattttattattgggttagaaattaggtaaatagtagtagttatatttgattttttgtatatatgagagtttgatatttattttggtttttaagtttttttaaggtgattttgttttagttattattatgtagtttttttagtttttttttggtttattttgaggagttgagtaatgatgagtagaatttttatgtttttggtaggtggaggagggtttttgaagtggtagagatgttgtgtaggagaaagataaggttggagttagatgtttaggtttaagttgtgaggagaatttagaatttgggaaggggtgtttttgggttttagagaagaatgagagttattggtttttattaggaaattaagtatgagttgggaggaaattttattttgggttattgttttataatttgttagaggttagggaaagatttattagtttattagttgggttttaatgaggttgtgtatatggtaggtgaggttaagttgtattatgataggtgtttgttggtttaggagttttgataggagtagtttttggtattttgttttttggattatgttaaggatagtttggtgttttagagaagtggtataggaaaggggaaaggtgaataaggtttagaggtttgaggagttattaaaaggtgaggggttgtaggtttgagttgtagatgggatatttttaataaagtatttgatgaattttttagttttaggtatagttagttattagtttttagtattttggatggtgaggattttagtatttattagatgtttgagggtagtgggaagttagtagagatgagggttgggttttgagaattattttttttttttatttattaatgtttatataagtttttagaaatatgggtaattatgtaagagagattggataataaaattttagtttggggtggttttgtgtttgtattaattgtttttgttggtgtagttgtttgttttaggttttttatttggattgttttttttttattttttttttttttgttattattattggtttagttaaatagttttttttttttgattatatgttttgatatatatttggttttaggattgaggagaggaattagagttttttgtgtttttgttat

SEQ ID NO: 79 - DNA, 2212 bp, Artificial Sequence
  chemically treated genomic DNA (Homo sapiens)
ttttagttttaagtgtgagttatttttggggtatttttaatttaggtttttggaagtttttgggggggtatatttggtggggagaaagtaggggttggggaggttgaagaaggttaggtttttagttgtttttattagtttttattttttagtttttaattttttttgtagataagttggtgtttaggaattatttggatttgtttttgggagattattttttgttttggaaagtttataagaagtttatttgtttagttttgttgttgggtatttgtgattttatggagttagtggtggagtagttgatttaggagttttgtgaggtaaggttgggtttttgaggttattttgggttagttttgttttttatagtagtttttgttttgtttgttgtatagtggtttgttgaatttatattgtttttttatagtgtatgagagtttagtttggtatttttgtggttattgaggaggaattttttttttttatttgtagtattatttgttattttatttttggagataagattaaggtgttttatagttttttaggtttatttttagtttttttttgagtttttttttgttttgaattgaaagtattttttttttttttggtaggatgataatttaatgtttgtttattataaatgtatttaggaggtgttaaaaatttggagttattggtttatttaaattgtggatgtgatttttttttttagggtgaggatttggagtttagatatttttgggttgtaggggagaggttggggtggagggagaggtttttttttatagttgtatttttatgttttttgttgtagtttttttttaatttaggtttttggaggttgaagtaggttatagagaagagggattatattgtggagatgtagttgaggtagtataaggtggggattgtatgtggatggtttttttttggtttatagttagtgatgttattggttttagtattgttatgaggtgggtttttttgtatattttagttatgggtttgttgttattttgtatttttttttttaggttagttgtttagtttgttttttttattttttgtaggagagttttgtggtaggttagtggagggatatgatggattatatgttttaaggggtggtgtagttgagtatggaagagggttttggatagtttttggaagggtatgtgtatatggttgtagtggattttttgattggtggtattgagattatagtaaatatttttttttgggttgtggtttttttgttttattattttgaggtgtgttttggggataagtaaaaggtttttttttagtaatttggttagggtggtgggtatttttatttagttttgagtattgtgtggttggggttgtgtttgttttattggtatttaggtttattgggttgttgagggagtggttggaggttgggtagttgtgggttgttggggtaggattttatttgattattttttagatttagtagtgattgtaggaggagttagattatgaattgggttttggtgtttttagtttttgggttttttataaggattgtgtatggttgtttttgtttaatgttattattgttgaggtgttgtgtttgtggtttgttgtgtttttagttttgttttattgtattatatggtttagtaggtgatttttgagggttggggatgagtgaggaaagtttgagtttagggaggttttggttagtttttaattttagttttttttagtatttttggttatgatatttttgagggtatagttattattttgaatttttaaggtgtttatttggatgagatggtttgggagaggttatatgagttttggtttggtatgtggggggttgggggtttgttgtgaaaatgtggtggaggttggtttttgttgttgttgaatgtttttttatttatttgtttatttgtttgtagattgttttttggagttaggtaagaattttagagttttggtttttggttgtggtgtttgtgtgtgtttgggtgagttgttggtgtgtttggagttttttgtggtgttgatttgattgttgtaggtttttatgttgttgttttttggggatgttttgttttttttgtagtttttgttttattgtagtgttatttttaagatgtagtttttttaagtgtggttgtagttttgggggatgggggtttatagtttgggttagagttagtga

SEQ ID NO: 80 - DNA, 2212 bp, Artificial Sequence
  chemically treated genomic DNA (Homo sapiens)
ttattggttttggtttgggttgtgggtttttattttttggggttgtagttgtatttggaaaggttgtattttgaggatgatattgtagtggggtaggggttgtagggagggtagggtgtttttggagggtagtagtgtgaaggtttgtagtagttgggttagtattatgaagagttttaggtgtgttagtggtttgtttaggtatatgtgggtattgtagttgaaggttagagttttggagtttttgtttggttttaggaagtgatttgtgggtgggtggataggtgggtggggaggtgtttagtggtagtggggattagtttttattatatttttatggtaggtttttggttttttatatattaggttagaatttatgtggttttttttagattgttttatttaggtgggtgttttggaggtttggaatgatgattgtgtttttagggatgttgtagttggagatgttgaagggggttggagttagaggttggttaggatttttttgggtttgggttttttttatttatttttaatttttgggagttatttgttgggttgtgtggtgtggtggggtaaggttaagggtataatgggttgtaggtgtagtattttggtgatggtggtattgagtaagggtagttgtgtatggtttttgtaggggatttgggagttggaggtattagggtttagtttgtggtttagttttttttgtagttgttgttgaatttggggaatgattgggtggagttttgttttagtagtttatagttgtttagtttttagttgtttttttagtaatttagtgagtttgagtgttggtgaggtaagtatagttttagttgtatagtgtttagagttgagtgagggtgtttattgttttggttaggttgttgggaaggagttttttgtttgtttttaggatgtattttagggtggtgaagtaaaaaaattatggtttaggagagggtgtttgttgtggttttagtgttattgattaggaggtttattgtagttatgtgtatgtgtttttttaggagttgtttagagtttttttttatgtttggttgtgttattttttggagtatgtagtttattatgtttttttattggtttgttatgaggtttttttgtagagggtgaaaggagtgggttgagtggttggtttggggagaggagtatagagtggtaataggtttataattggggtatgtaaaagaatttgttttatagtaatgttgaggttggtagtattattggttgtgggttgaggggaggttgtttatgtatagtttttattttgtgttgttttagttgtatttttatgatgtgattttttttttttatggtttgttttagtttttggagatttggattggggaagaattgtggtaggaagtatgagaatgtagttgtgggaaggagtttttttttttattttagttttttttttataatttaggggtgtttaggttttaggtttttattttgagaaagggaattatgtttataatttggatggattagtggttttaggtttttaatattttttggatatatttgtaataggtaggtattaagttgttgttttgttagaaaaggagggagtatttttagtttaggataaggagaggtttagggaggggttgggggtgggtttgaggggttgtgaggtattttgattttgtttttgaaggtgaggtaatagatgatgttgtaggtgaggagagagaatttttttttaatggttataggggtgttgggttgggtttttatgtgttgtggagaaatagtgtgagtttagtaggttgttgtgtagtgggtagggtgggggttattgtgagaggtgaggttgatttgaggtggttttaggagtttagttttattttatagaatttttgggttagttgttttattattggttttatggagttatggatgtttagtagtagggttgagtgggtgagttttttgtgggttttttagagtagggagtagttttttaaggataggtttgggtagtttttagatattagtttgtttgtaggaggagttgggggttggagggtgggaattgatgaaggtagttgagggtttgattttttttggtttttttaatttttgttttttttttattagatatgtttttttaagagtttttagggatttggattggggatgttttaaaggtggtttatatttgaggttgagg

SEQ ID NO: 81 - DNA, 2500 bp, Artificial Sequence
  chemically treated genomic DNA (Homo sapiens)
gagaaggagttaggtaaagagtaggggtagatgagggtatttggggtagaaggagaatatataaaggtttagaggttgggggtaggatagggtatttttggggatattgtatgtaattgattatatttggagtttggatttggaagtggtggaagagatggagatggtgagataagtagtaagtatgttagttttttaggtgtgtttttttttgatgagtattgttttattttatgtaattttgagaagtttgggttttttttattgtggtagaggttttttgaggtttttgtatatatggttttatggttgtttattagattttttttttagtagttgtttagtatggtggtggtataagtttattttttggagttagggatttagttgtagtaagatatggtttggtttgggaggttaattatgaagaaggtagtagttgttattgtttaattttagaaattttaattttgtttttttttttttagttttgattatggatttagtagtagtgaatttgttaatgtagtgggtggtatagttagggttttgattttggttttgtagtagtatagtttggaaaagttttgaggggagagagatttttattggtttgagggtttggtatagagttagaaatgggggggaaggtatggggttgggttgtttttgattttttaggtattatttaggaggttttggttttttattgaattttgttatttttttttggtatggtttttttttaaatttttaaattgtttttttatttataaaagtggtttttgagtgttagtttagtgggatttttattttttatggttttagttttttaaatagggttggatttttgattttgatttagttgtggttatttagtttttttttggggattttggattttgaggggggtatgtttagttgtgttgggaatttatattttttttggttggagtagaatttgtggattgtagttttgagggtagttatgttttgtttgtgtttggaaatataagaaatttgattgtagagagaagaaagaggagagaggaatagagtgaggaaattgtttgtttttggggttttttttgttttttatttttgattttttaagattagtggggtttttttttttgttttttttttttgagttttgtgaaattttttaatttttattttttattttaaattagtttaaggtgggttgttttttttttaattaaagaaaggtgtttttggtggttaaaggtatatatttgatagttagatttttaggttggaattttgttttttataatatgtgaataatatttgtgttgtatatagagtatggttgtgaagagttgagtgagtgtttataaagtatttagagtagtgtttggtatatgttattattttgtagtgggaaattatttttttttttgttttttgggtatttttgtgagtgaagggaggtattaataataattatattgggatatttgtatatattggaatgttttaggtaaattaggtttaaattgtattattttatttgtagtttaaattaataaataatttatataaattatattttgttttttaggtgatttaggaaggtttattaggtagggattgttattttttttttgagataaatattatgttagtaaattggtttatggtggggtggtagagggagagggtttaggtgggggtggatattattgtttgtatagttgatgtggaattagaaagttgattttggatgtaggaaaaaggttagggttgtattttttttttttgttttttgatgggtgattaatttttttgaaatatggatgttttaaggttaatgagattggtgttattttagaaaagggttattttgtgggtgggttggtgggagggtatttgaaggtggggttaagggaggttttaaaatagtttatatagtaggagggatggttggggtttttgagttataagtggtattttagggttttgatgggtgttttgttatgttgtttttgggtttgttgttgttgttgtttttgttggttggtgtttgtttgttgtggaattggtggaagttttggagtttttattttttgttttttgttttgggttttttgtatttgttgtagtttgattttttaatttatttgtttggtttgatttagaaatttgggtttatttataggttttattttgggttgtaaggtgagaggttgattttgttttggtttttattataggagggggtggaggtgatggagagggttttttttttgttgatgttgttttggttgttttttagatgtggtggtgttgaattttaagaggattattgaggaagttatggttaaaaagtgggtagattttgttggtagatttgagttatttatttgtaagggttgggggtatttttttttttttaaaaaaatttttttttaagagatgggtttttgttatgttgtttaggttggttttaaatttttagttttaaatgattttttta

SEQ ID NO: 82 - DNA, 2500 bp, Artificial Sequence
  chemically treated genomic DNA (Homo sapiens)
tgggaggattatttgagattaggaatttaagattagtttgggtagtatagtaagaatttattttttaaaaaaaaatttttttaagaaagaaaaaatgtttttagtttttataggtaagtggtttaggtttgttagtaaagtttgtttattttttgattatggtttttttaatggtttttttggagtttagtattattatatttgggagatagttaaagtagtgttagtggagagaggattttttttgttatttttgtttttttttatggtgagggttagagtgagattagttttttattttgtagtttaaggtggagtttgtagatgggtttgaatttttgagttaggttaagtagatagattgggaggttgggttgtagtaagtgtaagaagtttggggtaagaggtgggaggtggaggttttggagtttttattagttttatagtaggtgggtgttagttagtaggggtagtagtagtagtaggtttaggagtagtatggtgagatgtttgttagggttttgaggtgttatttatagtttaagagttttagttattttttttgttgtgtagattgttttggggttttttttgattttatttttaggtatttttttattgatttgtttatagagtggtttttttttggaatgatattagttttattggttttgggatgtttgtattttaaaaaaattgattatttattaagaagtaaggaagggaaatgtaattttgattttttttttgtatttagagttagttttttggttttatattaattgtgtaggtaatagtgtttgtttttatttgggttttttttttttgttattttattgtgggttagtttattggtatgatgtttgttttagagagaaaatggtagtttttgtttaataggtttttttgaattgtttgaagaataaaatgtgatttgtgtgggttgtttgttagtttaagttatagatagagtaatatagtttaagtttggtttgtttggggtattttagtatatataggtattttagtgtgattgttattagtgtttttttttatttataaaagtgtttagaagataaaggaggaagtggttttttgttgtggagtaatagtatgtattagatattgttttaagtgttttgtgggtatttatttaattttttatagttatgttttatatgtaatatgggtattgtttgtatgttgtggagggtaggattttagtttggaaatttagttgttgaatatgtatttttagttattaggagtatttttttttggttgaaaggaaaatagtttattttgagttggtttgagataaaaaataagaattggggaattttatagaatttaggaaaaagaagtagaggaggggattttattggttttagaaagttaaggatagggaatagaaaaagttttggagatgggtggtttttttgttttgtttttttttttttttttttttttttgtagttaagttttttgtgtttttaggtataggtagaatatgattgtttttaggattatagtttataggttttattttagttagggaaagtatggatttttagtataattgggtatgttttttttaaagtttaaagtttttaggaaggggttggatagttatagttggattaggattaagggtttagttttatttggggaattgaagttataaggggtgggggttttattggattgatatttagagattatttttgtgggtaaggaggtagtttggggatttgggaagaggttatgttaaagaggagtggtagggtttagtgagaggttagggttttttggatggtatttgagaggttagaggtgatttagttttatatttttttttttatttttggttttgtgttagatttttggattagtgggggtttttttttttttagagtttttttagattgtgttattgtagagttagagttaagattttggttgtgttatttattatattggtgagtttgttgttgttgaatttatgattaggattgagagggagaaaataggattgggatttttggggttgggtaatgatagttattgttttttttatggttgattttttagattgggttatgttttgttgtaattgaatttttggttttggaaaatgggtttatgttattattatgttgagtagttattgggagaaagatttgatgagtaattatagggttatgtatgtaagagttttaggaaatttttgttatagtgggaaaggtttaaattttttaaagttatgtgggataagatagtgtttattggaaaggagtgtatttggaaggttgatgtgtttattatttgttttattatttttattttttttattatttttaaatttaaattttgaatgtggttaattatatgtaatgtttttaaaggtattttgttttgtttttggtttttgggtttttgtatattttttttttgttttagatgtttttatttatttttgttttttgtttggttttttttt

SEQ ID NO: 83 - DNA, 2500 bp, Artificial Sequence
  chemically treated genomic DNA (Homo sapiens)
gttaagttttatgtttatattaatgagttttgtattgtttttaaggtttatttagttaaaaagaagttgaatttggtttttgttgttattatttttaatgagttttttgggaataatttttttatatatttttttttggattttataaatgttgaaaatattgttttttagtttttaaggatttgtggtttttggtggtagatttagtgtttggagtagttgttggtgttttatgtggtagagatttggtggttgtaggaaaaggagttggattttttagaattggatgatttagattttgtatatttgtaggaggtatggttgaagtgtaagttgatttgtttttttgggtgattatgtgagttgaaagattgttttttattgattggttgtgttatagagtagtgtattttttattgtggtatttgttatttagaggttaataggtgtattgagtggtttattaataagttagggtttgatattttttttgattatggggatgtgttttgggttgtagagaaggtagttgtttgatatagttttggttttttttgatagtagttttagtttatggtttaggatgttttttgagatgtgggtattaggttataggagtgatgttattttgattttatttataattttggttgttattttatagatgattataggttaggtagggggttggtgggatgttttttagtgatttttatatgttaggtatgaggtggatggggtatttttttagttttttttagggtttttatttttttagtttttttaagggttgagtgttttgattttatgtttttttatgtaggtgttgattttgtattattagattttgtgttggtttggtgtttttgggaaaattggagtttggttatgagttggttggatgaggttatttttaaatatgtaatgttgtaagataaaagtgaggagggtgagagaaaaaagagaagagtttggttttaaggtatttttttttattttgtagatatttttgaagtttttttggattttggtgaggtgtggatggggtatagtttttagagagatattgttttttttttgtattggttattagggagtttaggttgattgatgggggagtatgagaaggaaagtaagaattaaattttttggggtaagggattttttagagaaatttttttgttttttagggttttagtggaatggtattttaggggtgtttttttgtttttagagttgagatagatgatgaagatgatgaggagagtgatgaggaagaggaggaggaggaggaagaagaagaggaggaggttatagattttgaagaggaggaggatttggaatagatgtaggagggttaggaggatgatgaagaggaggatgaagaggaagaagtagtagtaggtatgttaagggaatattttttttatttgttatttttgttttgttaggtatgagttatttgtttgaaatttttttttttttttttttagtgtttttttagtagtatttttttttttttatttttaggttattttttttttttttttttttttttaggtaaagatggagataagagttttatgtttttattatagatttttaatgaaaagaatttggaatttggtaaatagattagtagatttttaggggagtagtaaaataaaggatgtatagtgttattattgttattgttagaagaatttttggttttttttagtatagatgttgaaagtaatggagaatagtttgaggagttgattttggaggaagaaagttttgtgttttagttttttgagttagagattgaagttttgtttttggatatttttttttttgtggagatggatatttttttttttaggaagtaattagaggagttttttattattgttttagagaatggagtaggtatggttttttttattttttttaatggaggtgtttttttttataattggggagattttggttttttttgtaaaaaattttggaaggagaagaagtaaataggattagggttattaggaaataggtaataataagaggaggaggaagagggaagttaaggagggattgtaggggatttttggagagtaatattggggaattgagtttgttgggagagattggattgtttttttttagttttagtttttttgtatttttttatatatttatgtttttgtttttagttatgtggaaaggtaaaggttagtgtatgagaagaatgggaaaaagatatgtattttgtttagtttatttttttttttggtttttttggttttagttgttgatttttttatgagggtggatttttttagttatggtttggtgattagttttttttgtattttttttttagtttggttgttttaaattttttatttatagtttttttggtttggtatttgtaaggtaagaaggggagggtgtgttttttttgataatttgtttttttttattggttgttttagttgttttgtttgaatattttatg

SEQ ID NO: 84 - DNA, 2500 bp, Artificial Sequence
  chemically treated genomic DNA (Homo sapiens)
tgtggaatatttagatagagtagttgaaatagttaatgaaagagaataaattgttagaggaaatatgtttttttttttttattttgtaagtattaggttgaggaggttgtgaatggggggtttgggatagttgggttggagaagggatgtagagggagttggttattaggttatggttgggagagtttatttttgtggaggaattagtaattggggttaaggaagttaagggggaaggtgggttgggtagggtatatattttttttttattttttttatgtattgatttttgtttttttatatagttagaaatagaaatataaatatgtggaggggtatgggaagattgaggttggaggggggtagtttagttttttttagtagatttagttttttagtattgttttttgaaagttttttgtaatttttttttggttttttttttttttttttttttgttattatttgttttttaatggttttgattttgtttgttttttttttttttgagattttttgtaggggggattagaatttttttagttgtgaggagagatgtttttattgaaggaagtagaagagattatgtttgttttattttttaagatagtggtgaagggtttttttgattgttttttggaagaggaaatgtttgtttttatagaggaaggggtatttaggggtaaagttttaatttttagtttaaagagttgagatatagggttttttttttttagggttagttttttaggttgttttttattgtttttagtatttatgttggagggggttaggggtttttttgatagtaatgatggtgatattatgtgttttttgttttgttgtttttttgaagatttgttgatttgtttgttaggttttaggttttttttattggagatttgtagtgaggatatggggtttttgtttttatttttatttggaaaagaagaaaaggggagagggtagtttgagaatgagggggaaaaaatattgttgagaggatattaggaggaggaagggaaaggttttaaataggtggtttatgtttaataaaatagaaatgataggtgaggagaatgtttttttgatatatttgttgttgtttttttttttttgtttttttttttattatttttttgatttttttgtatttgttttagattttttttttttttagaatttgtggttttttttttttttttttttttttttttttttttttttttattattttttttattgtttttgttatttgttttagttttggaggtagaagggtatttttgggatgttattttattagggttttgggagataaagaagtttttttaaggaattttttgttttagagggtttggtttttgtttttttttttatgtttttttattagttaatttggattttttggtggttagtgtaggggaaggataatgtttttttgaaggttgtattttatttatattttattagaatttaaggaggttttgggggtgtttgtagagtgggaagaggtgttttggagttgagtttttttttttttttttttgttttttttatttttgttttgtaatattgtatatttggagatgattttatttagttgatttatggttaaattttggtttttttgaaggtgttgggttaatataggatttgatagtgtagggttaatgtttatgtgggaagatataaagttagagtatttagtttttgaagggattagaagagtaaaaattttagaaaggattagagagatgttttatttgttttatatttgatatataagggttattgagaggtattttattaattttttatttggtttatagttatttgtgaggtggtagttaaagttgtagatgagattgaggtgatgttgtttttgtaatttgatgtttatattttggaaggtattttgagttatgagttggagttgttgttgggggaggttaaggttgtgttgggtagttgttttttttatagtttgaagtatatttttatagttagggaaggtattaggttttggtttgttgatgagttgtttaatgtgtttgttaatttttgggtagtgggtgttatggtaggggatgtgttgttttatgatatggttggttagtgaagagtagttttttagtttatatagttgtttaaagaggtggattagtttatgttttaattgtgttttttgtaggtatgtggagtttgggttatttaattttgagagatttaatttttttttttgtagttgttggatttttgttatatagagtgttagtagttgttttaaatgttggatttgttgttgggaattatgggtttttggagattgagaggtagtgtttttagtatttgtggggtttaaggagaggtgtgtgggagggttatttttagagggtttattggaggtggtggtggtaggggttaagtttagtttttttttggttgagtgggttttgagaatagtgtagagtttattgatgtagatatagagtttggt

SEQ ID NO: 85 - DNA, 1425 bp, Artificial Sequence
  chemically treated genomic DNA (Homo sapiens)
gatgttttttttattggtgaggttggggggaggtataggttttggtatagggaagtagagtttgggagatttggttgtttggagttttgtttttaatttatttttgtttttaaatttttgtggttttttggatttaggttgggagttttttgtaggtttttttaaatggattaattattgaggagttgagattgtggtggatatgttttgggtgtggagtgggattagtttagggagggagggggtgtaggtgggggttggaagggtttgggtgtttgttgaggaaatgagaggtagagagtagtttatgtttgaagatattttattattttttttgtgtttttgaatatttttttttgttttttttaggattttgttgtttttattgtgttagttttgggttttttttatttgtgtggtttttgtggtatggggggattttgtattgttgtggtaggtagtagtgatgttgtttaaaaggttgtttgggtgaggagggggtggggttaatgaaagtgggtgtagttttgggtttgggaggttgggagttgggaggtttaggaaattagttttaatttttgtttttaatgggttgtttattttatatgaaagaatataggagaaaataagaagttataatagtaggattgggaataggggtgattaatttgtttttttggagttttaggaaattttaaaggtggtatttaaattgtgattttaaggatgggtaggatagataggaggggttggggaaggtagggggttgaaaataattgtatgtgattttaaggtggaaattagtaaaggtaattaaagtatttagtgtttgatatattgtaagttttatgtgtttgttgttattattttttataaatgttagtttgtttttagtttttagtggtggttgagtaggtagatatagttgtggagaggttttgagatttgaatatttttttttttttttaggtaatggtagtgttgatagattatttatatgtttttttgatttttttagatgatgtagttgttgattgtttttttttttgttttgggttgtttggtgtgttttttttttttttgtattgtggaggtggggatttgtttaatagttaggaggtgagagagggtaggaattttaatattaagtattattagagaaaagagttttaggtttttttagtgggaggaaggaagggtattttttttagaagtttgggtggggttattttgagttggttggaagagtggtttggtttagtttgaggttttatttttttttttttattttatgttttttttgtgtaggtattgtagaagttttttgatgttattttggtatttgtgttttgtttagaattggagaaggttggtgttgggtttagttttttttgtttggtgtttagtatatgtttttatagttga

SEQ ID NO: 86 - DNA, 1425 bp, Artificial Sequence
  chemically treated genomic DNA (Homo sapiens)
ttagttgtgggggtgtgtgttgagtattaagtagagggagttgagtttggtgttagttttttttagttttgagtaggatataggtattagggtgatattagagagtttttgtagtgtttgtatagggaagatatggagtggggagaggggagtgagattttaggttgagttaggttatttttttagttagtttagagtggttttatttaggtttttagagaaggtatttttttttttttttattaggaaagtttgaaatttttttttttgatggtgtttggtgttggagtttttgtttttttttattttttggttgttgggtagatttttatttttatggtgtaggaggaaagggggtatattaggtaatttaggatgaagaaagagatagttagtagttgtgttatttgggagggttagggaggtatatgggtgatttgttagtattgttattgtttagaggaaagaggaagtgtttgagttttagaatttttttatagttgtgtttgtttgtttaattattattaagggttggggatggattgatatttgtggaaaataatgatagtaagtatatagagtttatgatatgttagatattaagtattttagttatttttgttaatttttattttggaattatatgtagttatttttaattttttattttttttagttttttttatttgttttatttatttttagagttatagtttaggtgttatttttggggttttttgaaattttggaagagtaaattaattatttttgtttttagttttgttgttgtaattttttatttttttttgtgtttttttatgtaagatggatagtttattgagggtaggggttagggttaattttttaagttttttagtttttggttttttgggtttagaattgtgtttatttttgttggttttgttttttttttatttggatagttttttgggtagtgttgttgttgtttgttataatagtgtgaggtttttttatgttgtagagattgtgtaggtgggagggatttgagattggtatagtggagatggtgaagttttagggagagtgaagggaggtatttaggggtgtgggaggggtgatggggtatttttaaatataggttgttttttgttttttatttttttagtgggtgtttaggtttttttgatttttatttgtattttttttttttttaggttggttttgttttgtatttggaatgtgtttgttatgattttagttttttggtgattggtttatttggagaggtttatgaaaaatttttggtttgagtttgggaggttgtggaggtttgagggtgggagtgagttagaaataaggttttagatggttgagttttttaaattttatttttttgtgttaagatttatgtttttttttagttttattggtgaagagaatgtt

SEQ ID NO: 87 - DNA, 2500 bp, Artificial Sequence
  chemically treated genomic DNA (Homo sapiens)
ataattgggtttaagatgttttgaatttgataagaggtggtagttgagttttttaggattttagggtttggagattttagtatagggttttgagattagtataggttaggatagttttttttgtagtaggggaggggagagtagttatttgggtttgtaaggagatgttatttagaatagttttatgtggggtaagttttttgggtttgaggaatagagtagggatttttaaattttaatgggtataggttatttgggaattgtgttaaaaggtagattttgattgagtaggttaagggtgagtttgagattttgattttttttatgtttttaggtattgttgatggtttagggattattttgggtttagagggttataggggatagtaagattagaaggtgttggggttttttttgttttttttttagaattttggatttttatgtgggagggtagtagggtgagttggtttaggtttatttgatgtttaattttattatatttttaataaggaattgtttaattttttttgggatatatttattttttaaaagttaaaatgatttttatatttttttatatattttatgattttatataaatgtatttatgttataagatttagaaaaatagtataattaatttgtttttttaaatttgttttttttttgttttgtttatgttaatttttgttatattgtattttattgttatattttattatatattttttttttttagatgtatatataggtatatatataaatatgggtgtttgtttattttatttttaaaaggtgggatattttttatatttttgttgtttgttttttatatttaatagatatatatggaaattatataaagttaggaatatattgtttttttgttattttttatagttgtatagtagttaataaattttattttttttaattttagtttgttttttgtgggtatttatatattttatagatttatgttttataaaaggtattataataaatatttttgaaatttttttttttatttttattttttattttttttaaagagatggggttttattatgtttattaggttggtttttaatttttggttttaagtgatttttttattttggttttttaaagtgttggggttataggtatgagttattagatttagatttgtatatatgtttttattttttggtgttttttttttgagggaatgttgggttgaagaggatgtgtatttttaattataatagatattgttagattgttttttaaatagaagataatatttatttttgttattgagtatggtgtttttttttttattattttttattatttttatatgttatagttttaaaaaaatattttgttagtttgtttggtatttttttgaggttggtgaatttgattattaaaaaaaatgtttgttggtaatttggttttgtttttttgtgaaatgattatttatattttttggttgtttttttattgggttatttatatatttttttttgttagtttttaaggggttttagtttattgtagttattaaatttttttttgttgtatgtgttataaatattttttgtatatttgttgtttgttttaagttgttgtttatggggatattttgtttatttttgattggagaaatggggttttaggaagttatttaattgatttttgttttagtttttttatgtgttaaatatggatagtaatagtatttattttatgaagtgattgtgaagataaaattatggattttgtttaagggtttaggttagtgtttggtataggggaagtattttaaaaatatagttgatgttgttaaataatgattgttgttgttgttttattgttattatttttaaagtggtttattttgtttgttgttgttagttatgatttagttttttgattaatttatgtattatttattttattttttgtagagatgttgtttttatttttttaggtttgagggattaggagttatgggattagaggttttgttatttttattgttgttgtttttggtggtaagtggagatgttgatatgaagggatattttgattttggtgaggagattgaattatgggtttttgagggttagggtttgggaggtagagagttgggggttttgatttgttatatgtttgttttttatttagttaagtgttgttatgttttgggtatgtaggattggattattttagatagtgatatttttgtttttagtttttggttagattttattgttgtttgttatagtaggtatttggtatatttggtatatttgtagttgttttgagaggagtttttgggatttttattttttttttaatttttttgtttatgttagtgaaatttttgtaggttgagggggtaaatgaagtggggtttaaatattggagatggaggtagatttggggttagatgttttttgtgtttttttttatttttaggttggagagtagtgatggggatggggtt

SEQ ID NO: 88 - DNA, 2500 bp, Artificial Sequence
  chemically treated genomic DNA (Homo sapiens)
ggttttatttttgttattgttttttaatttgagggtgaagaggggtatagagaatatttggttttaggtttgtttttatttttagtatttaaattttattttatttgtttttttagtttgtaggggttttattggtatgggtagaggggttggaggggaagtagaggttttaggagttttttttggggtagttataagtgtgttaggtgtgttaagtatttgttgtggtgggtggtagtggaatttgattaggagttggaagtagagatgttattgtttgggatggtttggttttgtatgtttagggtatagtggtatttggttgagtaaaaagtaggtatgtaataggttaaggtttttaattttttattttttaagttttggtttttagggatttatgatttagtttttttattaggattaaaatgtttttttatgttagtatttttatttgttattaagagtagtagtagtaaagatgatagggtttttggttttatagtttttgattttttgggtttaagggggtgggggtagtatttttgtaggggataaaatgggtggtgtgtaagttaattaggggattgagttatagttgatagtaatagatagaatgggttgttttggggataataatagtaaaataataataatagttattgtttaatagtattagttatatttttagaatgttttttttgtgttagatattggtttaaatttttaaatagaatttataattttatttttatagttattttataaggtagatattattattatttatatttaatatatgaagaaattagggtagagattagttaaataattttttaaagttttatttttttaattaggaatgggtaaaatatttttataaataatggtttagaataaataataagtgtgtaaaaaatgtttataatatatataataggaaaaggtttaataattataataaattaaggttttttaggaattgataagaaaaaatatataagtaatttaataaagaaatagttaaagaatgtgaatagttattttatagaaaagtaaagttaaattgttaataaatattttttttaatggttaaatttattagttttagggaaatattaagtagattgataagatatttttttaaggttgtaatatataaaagtggtagaaagtgatgaaaagggaggtattatgtttaatggtagaaatgagtgttattttttatttggaaagtaatttagtaatgtttattataattaaaaatgtatattttttttgatttagtatttttttgagagagaagtattaggaagtaagaatatatgtgtaggtttgggtttggtggtttatgtttgtaattttagtattttgggaggttgagatgggaggattatttgaggttaggagttagagattagtttggtgaatatagtgagattttatttttttaaaaaaagtgaaaaataaaaataaaaaagaagattttaaagatgtttattatggtattttttgtaagatataaatttgtaagatatgtgaatgtttataggggataggttggaattaaaaaaaataaggtttattgattattatgtagttatgaaaagtaataaagaggtaatatatttttaattttgtgtgatttttatgtatatttgttgaatatgaaaagtaagtaatagaagtataaaaaatattttattttttgaaaatagaataaataagtatttatgtttgtatatatatttgtgtgtatgtttagaaggagagaatatataatagaatataataatagaatataatataataagagttaatatgaatggggtaaaagaaaagtaaatttaaaaagataggttgattgtattatttttttaaattttgtaatataaatgtatttatgtaaaattataagatatgtaaaagaatatgaaaattattttgatttttaaaaaataaatatgttttaggaaaggttgggtaattttttgttgaggatatgatagaattaaatattagataagtttggattagtttattttgttgtttttttatataggagtttagaattttaagagaagggtagaggggattttagtattttttagttttattgttttttatagttttttaggtttagggtggtttttggattattagtaatatttggaagtatggaagaaattagaattttaggtttatttttgatttgtttaattaaaatttgttttttaatataatttttaggtgatttgtgtttattaaagtttgaaaatttttattttgttttttaggtttaggaagtttattttatataaaattattttaaatggtatttttttataaatttaagtaattattttttttttttttgttgtaggaaaagttattttaatttgtattggttttagagttttgtattgaagtttttaggttttggagttttgagggatttgattgttattttttattaggtttagggtattttgggtttagttat

SEQ ID NO: 89 - DNA, 1299 bp, Artificial Sequence
  chemically treated genomic DNA (Homo sapiens)
tttttagtttgtaatttttgttttttaggggtttaggttggttggtagaggttatagtgatgtggtgggggtatttgataaaattgttgatgatattgtatgagtggtaggagggttggtagttggtagttttttggttttagggaatattatatttgagtgaagtggagatattgaatgtttgggtttagaggtttgtttggttattgtttttttgggagtttatgtatatgggatataaatttgagtagtatatgtgtgtaggtgagttgtttttgttttatagttttttttttttttttagaggttgagagtttgttatgtttgttgttgtttttttttttgtgtagataaatttggaagttttttagatttttttggggaggttaatattaatgtggttttttgttttgtgttatgtagttgtttgggaagttattttttgttttttttaggggaggtagattgtatagatttttaagttttatttatatagtttttaatttgttatgtggagtttaagatttttaaggagatgtatagttttggttaatggaggagtttttataggtttaggattggggtgggtagggtgagagtttaggtttgaaggttgggaaagggatttggggaggagggtgaaggtagaatggagggtgtatgaggggttttattgattttttgttttttttgttagatataagtttttgaaatggtgggtttagttattttttttaggggttttgaatgttgttgttggtttttgtaatttagatggttttgtttttttttttaagattttttttattatgaagatgtttgaatatgttagggtaagggaatgatgttgtagtttttatttgtatttttaaatattaagattataggtttagtatttagggtaatagtttgttttttttttttttattatttttattgtttattttttgtttttttttttgtttgttttagaatgattgtgatggttggaatttttttgtgtgtatgaatttttgtgttgttttttttagttttgtttagagtatggttgtttaggatgattttaggtgaggtatttagttttgttttttttttttggattttaggatttagtttttggtttttaattgatgtttttatttgttttttaggtttgtttatttttttttttgggagtttggtggtttagttattgtgtttgtatattaagatgtattttatgtttttttgtttatatggtatgtggaagttatgatttaggattttttattattttttaagatttttttttttaaatag

SEQ ID NO: 90 - DNA, 1299 bp, Artificial Sequence
  chemically treated genomic DNA (Homo sapiens)
ttatttgggagagggagttttggggggtgatgggaggttttgagttatagtttttatatattatatgggtaggaaggtgtaaggtgtattttggtgtatagatatggtgattgggttgttaggtttttaagagaagagatgaatgagtttggggggtagatggaggtattagttgagggttagaggttggattttgggatttagaggggagggatagagttgaatgttttatttggggttattttggataattgtgttttgggtaaagttaaggaaggtggtatagaagtttatgtatatagagggattttagttgttatggttattttggagtaggtagaggaggaggtagaagatgggtagtgggggtggtgggaggagagaaggtaggttgttgttttggatgttagatttgtggttttggtgtttggggatatgggtgggagttgtaatattgtttttttattttgatatatttaaatatttttatggtaggaaaggttttgagggaagagataaaattgtttgggttatggaagttagtaataatatttgggatttttgggaggaatgattgagtttattattttaggagtttgtgtttgataggaaaagtaagggattagtgggattttttgtgtattttttattttgtttttatttttttttttaagttttttttttagtttttaagtttaagtttttgttttgtttattttgattttgaatttgtagaaatttttttattggttagggttgtgtatttttttggaggttttgagttttatatagtaggttgggggttgtgtggatggggtttgggggtttgtgtagtttattttttttgagaagagtagagggtggttttttaggtggttgtgtagtatagagtagaaggttatgttggtgttaatttttttagaggggtttggggagtttttaggtttgtttgtataaggagagaagtagtagtaggtgtggtgggtttttaatttttgggaaggggaagggggttatgaagtaggggtaatttatttgtatatatgtattgtttaaatttgtattttatgtatataagtttttggaggagtggtggttgagtaagtttttgggtttgagtgtttggtgtttttattttatttaggtatagtgttttttggaattgggaggttgttagttgttagtttttttgttgtttatatggtgttgttagtagttttgttaggtgtttttgttatgttattatggtttttgttagttagtttggatttttgagaggtaggagttataggttgaagg

SEQ ID NO: 91 - DNA, 1945 bp, Artificial Sequence
  chemically treated genomic DNA (Homo sapiens)
ggtttattagtttataaatgaagagttttggttttgaaaggttaaagttaaaattaaattttaaatttttggtattagttaaggattagggaggggtgtgtgtgtgtgtgtgtgtgtgtgtgtgtgtgtgtatatgtttttaatattttattttaatataattttggattgatagaaaagttgtagaaatatttaattttttttaatgttaatattttatataattatagtataattattaaaattataaaataattgatataatattattaattaatttatagattttatttgatttagtaagattttatattgtatttagtttttatgtttttttagttttttttgatttgtgttagttttgtttttttttgttttttatgattttgatatatttgaagagttttgataaattattttatatttggagtttaaaaaattatttttagggttagtgtagttatttgtatttgtaattttagtattttaggaggttaaggtgggaggattatttgagtttaagagttgagattagtttgggtaatatagggagattttgtttttataaaaaataaataaataaataaataaatagattaaaaaattagttgggtgtggtggtatatgtttgtagttttagttatttagggggttgaagagggaggattgtttgagtttgggagattgaagttataatgagttatgattatgttattatattttagtttggggaataaaatgagattttgttttaaaaataataataataataatttttaggttaggtttggtggtatatatttgtaattttagtattttgggaggttaaggttgaagagttatttgaggttaggagtttgatattagtttgggtagtaaagtgagatttttatttttataaaaaatgtttttaaaaaattagttaggtatagtggtatatatttgtaattttagttttttgagaggttgaggtaggaggattatttgagtttaggagtttgaggttatagggaggtatgattgtattattatattttagtttgagtgagagagtaagattttttttttaaaattaaataaaattatttttagattaaataaaaattatgtgttggatgtagtggtttatgtttgtaattttagtattttgggaggttaaggtgggtggataatttgaggttgggagtttaagattagtttgattaatgtggagaaattttgtttttattaaaaatataaaattagttgggtgtagtggtgtttgtttgtaatattagttatttgggaatttgaggtaggagaattgtttgaatttaagaggtggaggttgtggtgagttgagattatattattgtattttagttgggtaataagagtgaaattttgttttaaaaaaaaaaaaaaaattatagatatttgaaatattaaaaattattttatagaatgttttttgatatttatttatttgatatttgttatgatgagattgaggttatgtattttaagtaagaatattgtagaagtgatgttgtattttttttgttgtattatattaggagtttataaggttaatgtattaattttgattatttggttttagggaggtgttttttgagggggttgaaaatttttttgggttttttgaaattatatttgttttgttttagaaggtaagttttgaagttaggagtttaatattttagttttatttttttttttagttttagtgattttgatttattaatatttagtttgtgttgtagtttattattgtaattaagtggagatagagttggtgggagatgtgatttatttagtttatagggattgttatttgggagatttgtgtaatagtgttgtggtaagttatgtggtttttgtaggtattttggttgtagtagttattgttttgatttgttttttgttaggattgtggagtggatag

SEQ ID NO: 92 - DNA, 1945 bp, Artificial Sequence
  chemically treated genomic DNA (Homo sapiens)
ttatttgttttatagttttggtaagagataggttagggtggtagttgttgtagttaaaatgtttgtaggggttatatggtttgttatggtgttgttgtataggttttttaggtagtagtttttgtgggttggataagttatgttttttattgattttgtttttatttgattgtaatgatgggttgtgatgtaggttggatgttggtgaattaaggttattggggttgagagagagaatgaaattggggtgttggatttttggttttaggatttgttttttggggtagagtagatgtgattttaaggagtttaaagggatttttagtttttttaaaaaatatttttttgaaattaagtgattaaagttaatgtattgattttgtaaatttttgatgtgatgtagtaagaaggatgtaatattatttttgtagtatttttgtttaaaatgtatgattttaattttattatggtaaatattagataaataaatattgagggatattttataaaataatttttagtattttaagtatttgtaattttttttttttttttgagatggagttttatttttattgtttagttggagtgtaatggtgtgattttggtttattgtgatttttattttttgggtttaagtaatttttttgttttaggtttttgagtagttggtattataggtgggtattattatatttggttaattttgtatttttagtagagatgagatttttttatattgattaggttggttttgaatttttgattttaggttatttatttgttttggttttttaaagtgttgggattataggtgtgagttattgtatttggtatgtaatttttgtttaatttaaaaatgattttatttaattttagagaaaagattttgtttttttatttaggttggagtgtggtggtgtaattatatttttttatagttttaaatttttgggtttaagtaatttttttgttttagttttttaggaaattgagattataggtgtgtgttattatgtttggttaattttttaaaaatattttttgtagagatgggggttttattttgttgtttaggttggtgttaaatttttgattttaggtgattttttagttttggttttttaaagtgttgggattataagtgtgtgttattaagtttagtttaaaaattattattattattatttttgagatagggttttattttgttttttaggttggagtgtagtggtgtgattatggtttattgtagttttaattttttaggtttaagtgattttttttttttagttttttgagtagttaggattataagtatgtgttattatatttaattaattttttaatttgtttgtttgtttgtttgtttgttttttgtagagatagggtttttttatgttgtttaggttggttttaatttttgggtttaagtggtttttttattttggttttttaaagtgttgggattataggtgtgagtgattgtattggttttaaaagtaattttttaaattttaggtataaaataatttattagggttttttaaatgtgttagggttatgaaagataaagaaaaatagaattggtatagattagaggagattaagaagatatgagagttaaatgtaatgtaggattttgttaaattaaataaagtttgtagattagttagtagtattgtattagttattttgtgattttgataattgtgttatggttatgtaagatgttagtattaggagaagttgagtatttttgtaatttttttgttaatttaaaattatgttaaaataaaatattaaaaatatgtatatatatatatatatatatatatatatatatatatttttttttggtttttaattaatgttgaaaatttgaagtttggttttaattttggttttttagggttagagttttttatttgtgagttaatgggtt

SEQ ID NO: 93 - DNA, 2500 bp, Artificial Sequence
  chemically treated genomic DNA (Homo sapiens)
gggtttgaagtttatgggtaggttgttttttagagaggtgtggagatagttgagatttttttattgtttttagtttttttttttattgttttgtgttgtagtgtagattttgtgtggttggggtatggggttagttgtgggtaggtttgatttgggggttggtgtggggttgaaatttagtttgggttttgtttagtgatttttgtgtttagggttttatttttttagaggaaggagtgtttttgatttatataaaggtgtttaatgagtttttggggatatttagtgggatttgaggtttatagtggggtagattagatatagttttggttggggtattgaggttggggaaggagaggattgagttttatgggtttttttatttgttttgtaggtttatttttatgttattgtgtgagatgtttatggttggaagatgagtaagtttttaggtaatgttattgattttttggatgttatttatggaatttttttgtaggtgggttgggtgttgggttagttaggaagggttgtggggttgtggttatagttatttgattgtttttattttatttttagggtttttataattagttgttgaatagtaatttggattttagtgaggtggagaaggttaaagaagggtaggtatggagggttgggttgggttaagtaggagtatagtgtggatggggttggttgaggatgtttttttttttgttttttttttgtagaaagttgattttttagtggggatttttgaatgtggtattgatgttttttggtttggattatgtgtttatatgttttagggtatggtttttaaagtgttttttttagttatttttttttttttttgtgaggtttattttttttttttattttgagtttttggtgggtatgggttgggaagagggtgatgaggatttatattttatttttgatttaggttgtgatattaatttggatgtgaattggatattgggttattgttatttttgtaataagttttggaatgttattaagtttgttttttgtggttttgggaagggttttgtgtttttatttattttttaggtaagggtttggtgggtagtaaagttggtagtatttatataggttgtatttttgtttggagtagtttttatgtagttggggggatagatagatatagagatagatagttaaagggaaagtttagtgtattgggggttggggtttgttatttttttttagattttggtatataggtggttgttttggatttattagattttggatgaagatttgtttatgatttttgtttttatggggttttggtatttttttttggtttgttggttgatatattttttttttttaagtttggaggttatgagagtttggtggattgttggatttgtagttgtttgatagaggttgtgaggtttagtaattaaggtttttaggtttatgattttttggttgttattattgtttagtatagtttttggttttatgagttttgtgatgtttatttggtgagaaggagtatagtggggtaggggatggtgggggtaggtgggtagtagagttttgggtttagttttgttagagttggttttgagatttaagttaatttattttttttttagtttttataggtatagtgagggtttaaggttagatttttagttgtgagttttgtattttttgttttttaggagtgtttgaaatttgtattgaatggggtggattaggtggtagttgagtgtgtttgttagattttgtatatttgtttggatgttggtttgtggttgtttttattttttatgttttttgtgatggaggagttgttttagaggttgttttggaggatgttgtaagttttttttagtttttgtgttattttttatttggagtttttagaggtatggtatggtttggagaggggagtttgatttgttttttaggtttttttatttttttttttattttatagtgtttttggaaggattttgaggtagaagttgtttttgagttggtgttaagtattatgtgagttgtgtgttttttgtgggttgattataattttatttggatttggtttgattgtgagttttaggtttttatgtttgttttattttattgtttttttagtttattttgggatttagtgtttggtagtgattgtttggttttttgtttttatggagttaggttttatttttttttttttttggtaggttttttggaagtggtggatgaggttatgggtgttttggtattggtggtgttgggttatgtgtaggttttggttagtgtaggtgtggtggttgttttggttttgggggtttttgttttttagggttgtgttgtggttttggtttttgattgttgttttatttatttgtagttttaggggttggtggattttgtatgggagttgggtaagttgtaagttaagtgagttgaggtttagtggtaggtttagtgtttgtgggaatgttgtgttgttttg

SEQ ID NO: 94 - DNA, 2500 bp, Artificial Sequence
  chemically treated genomic DNA (Homo sapiens)
tgaggtagtatggtgtttttgtagatgttgggtttgttgttgggttttaatttgtttggtttgtagtttgtttagtttttgtgtagggtttattagtttttgaagttgtaggtggatggagtagtgattagaagttagagttatagtgtaattttggggggtgggagtttttagggttagaatagttattatatttgtgttggttagggtttgtatgtagtttgatattgttgatgttagggtgtttgtggttttatttgttatttttaggaaatttgttagggagggagaaaggtgaggtttagttttatggagataggaaattaagtagttattgttggatattgggttttagagtaggttgaggggatagtgggatggggtggatatgggggtttgaggtttatagttaggttggatttgggtgaggttgtagttggtttgtagggagtgtatggtttgtgtgatgtttagtgttagtttaagggtggtttttgttttggggtttttttaggagtattgtggggtggaggagggggtgagggggtttggagggtaggttagatttttttttttaggttatgttatatttttgagggttttgggtagggggtaatatagaggttagggggagtttgtggtattttttggggtagtttttggaatagtttttttgttatgaagggtatgaagggtgagagtagttgtaggttaatgtttaggtaagtgtatagggtttggtgggtatatttagttgttatttggtttattttatttagtataggttttaggtatttttaggggatgagaggtatagggtttatggttggaggtttagttttgagtttttgttgtgtttgtgaggattgggaaggggatgggttggtttaggttttaaggttaattttggtaaaattgagtttagggttttgttgtttatttgtttttattattttttgttttgttgtgtttttttttattaagtagatattatagagtttatagagttagaagttgtattgggtagtggtgatggttgggaagttgtaggtttggaagttttgattgttgagttttatagtttttgttaggtggttgtggatttagtggtttattaggtttttatggtttttgggtttggggagagagggtgtattagttggtgggttaggggagggtgttagaattttatgggggtaggagttatgggtaaatttttatttagagtttgatgagtttaaagtaattatttatgtgttaggatttgggaagaagtgataggttttagtttttaatgtgttgggttttttttttaattgtttgtttttgtgtttatttgtttttttagttatatggaggttgttttggataggggtatagtttgtgtgagtgttgttagttttgttgtttattaggtttttatttgggaggtgggtgagggtataaaattttttttaaggttatgaagggtaaatttggtggtattttagagtttgttgtagaagtggtggtaatttagtatttggtttatatttaggttgatgttatgatttgggttgggggtgagatgtgagtttttattattttttttttagtttatgtttattagaggtttagggtggagaagagggatgggttttatagaaggaggaaggagtggttgggagggatgttttgggggttatattttgggatatgtaggtatataatttaaattggagagtattggtgttatatttaggaatttttgttgggaagttagttttttatagggaagaggtagggggaggagtgtttttagttagttttatttatgttgtgtttttgtttagtttagtttaattttttatatttgtttttttttggttttttttattttgttgggatttaggttgttgtttagtagttggttgtggaggttttgagggtggagtgggagtagttaggtggttgtgattatagttttatggttttttttggttggtttagtatttagtttatttgtagggagattttatagatgatatttaggggattgatgatattgtttagagatttgtttattttttggttgtgagtattttgtatgatggtatggaggtagatttgtagagtaggtggggaggtttatgagatttagttttttttttttttggttttagtgttttgattaggattgtgtttggtttattttattgtgaattttaggttttattgagtgtttttaagagtttgttgagtgtttttatgtgaattagaagtatttttttttttgggaagatgaagttttgggtataggaattattgagtagggtttaggttggattttaattttatattagtttttgggttaggtttgtttatagttaattttatgttttagttatgtggggtttgtgttgtagtataggatggtaggagaggaggttgggggtgatgggagggttttggttgtttttgtatttttttaaagggtagtttgtttgtgagttttaggttt

SEQ ID NO: 95 - DNA, 2402 bp, Artificial Sequence
  chemically treated genomic DNA (Homo sapiens)
ttaggattttttattttttatggatgggttaggttgtttatagtttttgggtttgagatttattttgaagttgtgggattttgagatttttgttttgggagaggtttaggtgtttttatttggttttatttttagtttaggttaaaaatttttttgggttggttggggttgggtggggtttgggggattgggttgattgtggggttggggttaggtttttatattatttagataatgtatggttgtgatgtggggttggatgggtgttttttttgtgggtattggtaggatgtttatgatggtaaggattatattgttttgaatgaggatttgtgtttttggattgtggtggatatggtggtttagattattaagtgtaagtgggaggtggtttatgaggtggagtagttgagagtttatttggatggtatgtgtgtggagtggttttgtagatatttggagaatgggaaggagatgttgtagtgtatgggtattaggggttatggggtgtttttttgattgtttgtagattttttgggttggttttttataaggaggggagataattgggattaatattagaatattattttttttttggttttgagggagaggaatttttttgggttttagattttgtattagagagtgattttgaggttttgttttgttttttgatataattaagggataaaatttttgaaggagtgatgggaagatgattttttgaatattgatgagtggttttttttgatattggtagtagttttgggtttgtgatttttttttttaggttttgttttttgttttatatttaatgtgtgtgggggtttgagtttagtatttttgagttttttagtttttatttaggttaggattagaagttgttgttttttttttagggaatagaagattattttaggtgtttgtgtttaggttggtgtttgggttttgtgtttttttttttattttgggtgttttgtttatttttaagatggttatatgtgtgttggtggagtgttttatgatagatgtaaaatgtttgaattttttgattttttttgttagatttttttaagatatatatgatttattattttatttttgattatgaggttattttgaggtgttgggttttgggtttttattttgtggagattatattgatttggtagtgggatggggaggattagatttaggatatggagtttgtggagattaggtttgtaggggatggaattttttagaagtgggtggttgtggtggtgttttttggagaggagtagagatatatttgttatgtgtagtatgagggtttgtttaagttttttattttgagatggggtaaggagggagatgggggtgttatgttttttagggaaagtaggagtttttttggagatttttagtagggttagggttttttatttttttttttttttttagagttgtttttttagtttattatttttattgtgggtattattgttggtttggttttttttggagttgtgattattggagttgtggttgttgttgtgatgtggaggaggaagagtttaggtggagaaggggtgaagggtggggtttgagattttttgttttattgagggttttaagttttagttagaaatgtgttttgttttattattgggaagtattgtttataattatgggtttatttagtttgggttttgtgtgttagtatttatttttttgtaaagtatttgttaaaatgaaggatagatttattattttgattatggtggtgatgggatttgattttagtagttataagttataggggaaggtttttgaggatagattttaggagggttattggtttaggatttatatttgttttttttatgttttttgattttgttttgggtttgtagttatatatttttggaaatttttttggggtttaagattaggaggtttttttaggattttaaggttttggtttttttttggtattttataggatattttttttttatagatagaaaaggagggagttatatttaggttgtaagtaagtatgaaggaggttgatgtttgaggtttttgggatattgtgtttgggagtttatgggggagtttatttattttataattttttttttagttatattttttgtgggatttgattaggttttgtttttgttttattttaggtagtgatagtgtttagggttttgatgtgttttttatagtttgtaaaggtgagagtttggaggatttaatgtgtgttgggtgttgggtggaatagtggatatagttgtgttatggggtttttttgtattggatgtattgagtatgtgatgggttgtttaaggtgtgattttttattgtgatggatatgaatttgtttatgaatatttttttttatagtgtga

SEQ ID NO: 96 - DNA, 2402 bp, Artificial Sequence
  chemically treated genomic DNA (Homo sapiens)
ttatattatagaaaaaaatatttatgaataaatttatatttattatagtgaggggttatattttaaatagtttattgtatgtttaatatatttaatgtaaagaaattttatagtatagttgtgtttattgttttgtttaatatttaatatatattaggttttttaagtttttatttttataagttgtgagggatatattagagttttgggtattgttattgtttggggtagaataaaaatagaatttggttagattttatagaagatgtggttagaggaggaattgtgaggtgggtgggtttttttatgggtttttaaatataatattttaaggattttaggtattagttttttttatatttatttgtagtttgagtgtaattttttttttttttatttgtgagaagaaaatgttttgtgagatattagaaaggagttagggttttaaggttttagaggaattttttagttttggattttagagaagtttttagaaatgtgtgattgtagatttagggtgggattaggaaatatgaagaaagtaggtgtgggttttggattaatagtttttttgaggtttgtttttagggatttttttttgtgatttgtgattgttgggattaggttttattattgttgtaattaaggtgataaatttgttttttattttaataggtgttttataaaagagtaagtgttggtatatagggtttagattgggtaggtttatgattgtggatggtgttttttagtaatgagatagggtatatttttagttggggtttggaatttttagtgagataagaaattttagattttattttttattttttttttatttgagtttttttttttttatattatggtagtgattatagttttagtgattatagttttaaggagaattaggttagtaatgatgtttatgatggggatggtgggttgggaagatagttttgggaaaagaggggaaggtgaggggttttgattttgttaaaggtttttagagaggtttttgttttttttaagagatatgatatttttatttttttttttattttattttagggtgaggggtttgggtagatttttatgttgtatatggtaggtgtatttttgtttttttttagaaggtattattatagttgtttatttttggaaggttttattttttgtaggtttggtttttatgagttttgtgttttgggtttggttttttttattttgttgttaggttagtgtgatttttgtagggtagaagtttagggtttagtattttagggtggttttatggttagagatggggtggtgggttatatgtgttttgggggggtttgatgggaagagttagaaaatttaggtattttgtatttgttatgggatattttattagtatgtatgtggttattttgagaatggataggatatttgggatggggaagagagtatagaatttagatattagtttggatataggtatttgggataattttttattttttgagaagggaatagtgatttttggttttgatttgagtggaggttgagggatttagaagtgttggatttagatttttatatatattgagtgtgaagtagagaataaggtttgagaggaaaagttatgggtttaaggttgttgttggtgttaaagggaattatttattagtatttgagggattgtttttttgttatttttttagagattttattttttaattgtgttagagagtagggtggaattttagagttattttttggtataggatttggaatttaggaggattttttttttttaggattagagggagggtgatattttagtgttggttttaattgttttttttttttgtgggaggttagtttgggagatttataggtgattagggaggtgttttgtggtttttggtatttgtgtgttgtagtgttttttttttgttttttaggtatttgtggagttattttatgtatgtgttatttaggtaggtttttaattgttttgttttatgggttgttttttatttgtgtttggtgatttgagttgttatgtttgttgtggtttaagagtgtaggtttttgtttagggtgatgtaatttttgttgttgtaggtgttttgttggtatttgtggaggaagtgtttgtttgattttatgttgtagttatatattatttggatggtgtgagaatttggttttgattttgtggttagtttagttttttgagttttgtttagttttgattaatttggggggatttttggtttaaattgaaaatgaaattgggtaaaggtgtttgggttttttttggggtaagggttttggggttttgtggttttggggtggattttggatttggagattgtgggtgatttggtttgtttgtgggggatgaggggttttga

SEQ ID NO: 97 - DNA, 2500 bp, Artificial Sequence
  chemically treated genomic DNA (Homo sapiens)
tttttaaggattttagttttgaaggaggtggtatttttttagtagattggaattgattatgatagtgttttttataaggtaatgagtagatttatagattttagtttagggatgatggtagtttttgatttttagatagtaatttttttttaaaatgtatatttttaggatttttttttttttttttttttgtattttttgtttttttaatatttttgtaattaattttttatattaaatttttttagtttgaagtatataaagtagttaaatgtttttgattggattttggataattggtatgaggtttggggtttgagtttatgtatgtttttgtttttgttttattttttattttttttgtatagtttatttgggtgattttatttatggtttttgttttgatatttgtgttgatgatttttaaattagggtttttagattatatttggggtttatatttatatgttttattgtgtttttatgtagttttagttggttgttttattggtattttaaatttaatatgtataagattaggttttttttttttgtaaatttgtttttatggtatttttttttgttttaatttagtttatttttgattatttatttagttatttatgttggaaatttgagatatttttgatttttttatttttttatttttatagttaattagtagttaaattttttagattttattttttaattattttgatattttattttttttgttttttttaattatgatttaatttaggtttttattatttgttatttaaattattgttgtattgttataggagtggtgtgtatatgtgtaattgtttattttggtatgttatagatttttgtttagtagttttgttttaattttttaaaagttttagtttattgtttgaaatattaattagaatattttttttaaaatgttaaaatgattgttattttttagttttaatatttttattatttgttaagtaaaagtaagtttttttttgtggtgtagtagggtttatgtgatttggtttttgtttgaatttgtagtttattataatatttttttattttttattattttttattatataggaatatttaagtgatttttataatatttatattaattagtatatagggtttttaaagaggatttttggatgtttgtgatttttgtatttttgtttattttttgttttggtgtgtttttttttttttttatgttttgttggttaaattgttttttttttaagttttaggagtttgtttgattatgttttttttattttgtatttttataaaattattgtgatttttaaaatatttggtatatttttatttgaatatattatattgttgtgtaattattttttggtttttttttttagtattagattttaagttttttgaaggtagattatgtttatttatttttgtatttttagttttgggtttaatatttagaattttttgtatttttaatatatgtttgttaaatgaattagagttaatgtttgaaggagaataagtttttttgagaaagaggaagagttaggagggaggagaaggtagggtttgaagagttttgggggtttatttggggaagatgtggttttttattgtagtattttgttaggaggtggtattgttttgaagagttagttggttgtttatagattgaggttgatagtttgaaattaaagagggaattttattaggaagtaatatttttttattgggttttttagtttagttatatgttatattttgttttggttaaatagttaagtttttaggaggttattggttttaggtgtttttttagtgattgatgatgttaaattttatgtttttttgattggtttagataaaatgataagggtatttattggaaatgatttggtaaaatatgatttaaggttatttttttggggagggagttggggaagttgggttggttgggttggtagtttttatttattgtgtggtaagaaggtatgggttatgaatagaattaaggagttgtgttgttatagatgttattatttttgtggttgttattttatttttgggttgtttttgaaggtaagatggtatttttatttatttttattttgaatttagggagtttatttagttttgtgaggaaaagtgttgtgttttgtgagtggtgggaagttttatgaggtagtggaaataataggggagtggggaaagatagttgttatgtgtggttggtaaatgatattagtgatgttttgtatgttttatttaagataattttttgaagtggagattgttttttttattttataaatgaagaaaatgagatttagagttatttgtgtaagtttatattattggaaagtggtagagttgggatttgaataaagtgaatgttatttttatttttttatttaagattttattttgttttttattattaatttattttgtgatttttgaaaagtgttttagtttttttttttgtagagga

SEQ ID NO: 98 - DNA, 2500 bp, Artificial Sequence
  chemically treated genomic DNA (Homo sapiens)
ttttttatagagaaggaaattaagatattttttaagaattataagataagttaatgatagaaagtagagtagaattttgagtggaggagtgaaaataatatttattttgtttaaattttagttttattattttttaatggtgtgaatttgtataaataattttgagttttattttttttatttgtaaaatggagagaataatttttgttttaagagattgttttaaatggaatatgtaaagtattattgatattgtttattaattatatatagtagttgtttttttttatttttttgttgtttttattgttttataagattttttattatttataaagtatagtgtttttttttataaagttgagtgggttttttaggtttaggatggaagtaaataggagtattattttatttttagggatggtttaggagtggggtagtagttatagaagtggtaatatttgtagtagtgtagttttttggttttgtttatgatttatatttttttgttatatagtaggtaggagttattaatttagttaatttagtttttttaattttttttttgagagggtggttttagattatgttttgttagattatttttaataggtgtttttgttattttgtttaaattaattagagaagtgtagggtttaatattattagttattggggagatgtttggggttagtaattttttgaagatttggttgtttgattagggtagagtatggtatgtaattgggttgggaagtttagtggaggaatgttgttttttggtggagttttttttttggttttaagttgttagttttagtttgtaagtgattagttggttttttagagtagtgttattttttggtagaatgttgtaatggggaattgtattttttttaagtaaatttttagggttttttggattttgttttttttttttttttggtttttttttttttttaaaaaaatttatttttttttaggtattagttttaatttatttggtagatatatattgaaaatataagaaattttgggtgttgggtttagggttagaaatataaagatgaataggtatagtttgtttttaaagagtttagagtttagtgttgggggagggggttaagggataattatataataatgtaatgtatttaaataagaatgtgttaagtgttttggaagttgtagtaattttatgaggatgtggaataggaggaatataattaggtaggtttttaagatttgaaggaaaaataatttggttagtagaatatgaaggaagagaaaaatatgttagggtaaagggtaggtagaagtataaagattataggtatttagaggttttttttggagattttgtgtattagttgatatgaatgttgtgaaggttgtttgggtgtttttgtataataggaggtaatggggggtagaaggatgttgtgataagttataaatttgggtaagggttagattatgtgggttttgttatgttataaggaggagtttgtttttatttagtagatgatagagatattaaaattggggaatgataattattttagtattttggaaaaaatgttttgattgatattttaaataatgaattggagtttttaaagaattgaggtaaaattgttgggtaagagtttatagtatattaagatgaatagttgtatatatatatattatttttgtagtaatatagtaataatttaaatgatagataataagagtttgaattaagttataattagaggaggtagaggagatagaatattaagataattaggaagtagaatttaaagggtttggttattgattagttgtgggagtgggaaggtggaggagttaaagatattttagatttttagtatgggtggttgggtgggtggttagggatggattgaattgaagtagaaaagaatgttatgggagtaggtttatagagagaaagagtttgattttgtatatgttgaatttgaaatgttagtggaatagttagttgaaattgtatgggagtgtagtgaggtgtgtgggtatggattttaggtatggtttgaagattttgatttgagagttattagtataaatgttgaagtagaggttatgaataagattatttaagtaaattgtgtagaaggagtgggaagtgaaataaggataaaagtatgtatgggtttaaattttaaattttatattagttatttaggatttagttaggagtatttaattattttatgtgttttagattgaaagaatttaatatagagaattggttataaaggtgttaaaagggtaagaagtataaaaaaaaaaaaaaaggagagttttagaaatgtatattttaaaaaaagattgttatttggaaattagaagttgttattatttttgagttggaatttgtaaatttatttattgttttgtgagagatattgttatagttagttttaatttattagaaaggtgttattttttttaaggttagaatttttgagaa

SEQ ID NO: 99 - DNA, 2500 bp, Artificial Sequence
  chemically treated genomic DNA (Homo sapiens)
aataattttaatatataggatattatttttagaaataggatgtgaaggattatgatatagtggttgagtttgagggatatataatttggtttaatttatagtgtattatttattagttttgtatttttgtaaaagttgttttatttttattgttttattttttttatttgtaagtatgaaaagggtatttattttagtgagttgatgtgagaatgaaataaaaatatgaagtataaaaagtatttagtgtaattttgagtataaagtaaaatgtttatttttatggtagtatgatgagaattttgtttttggaaatattaaggtttataaggaatgagtgtttatgtggtagtatgtgaattaatgtagaatgttataagtatagttgtattttgaagtttattttgaattttagatgttatatttatattaataaaaagtataataattatttaaatgtatataatatgtttaatattatatggttatattaattgatgtaatttatagttttttttagtgtttttttttttgaatatttaaaaatgtattagttagtaaagttgttttatatttttttttatgataaaataagagaaatataatagtaaagtgttatagttttaattaaatgaggaaattataatgggaattaggaatgagggattgaatattttttatataaaatatttattattttaaaatagaattgtgattaggtatgatggtttatgttagtaattttagtagtttggggttatattgttggtgtagaatatgaagttaggagattgagattattttggttaatatggtgaaattttatttttattaaaaatataaaaaattagttaagtgtggaggtatgtgtttgtagttagagttatttgggaggttgtggtaggagaattgtttgaattgaggaggtggaggttgtagtgagttaagattatgttattgtattttagttagggtaatagagtaaggttttgttttaaaaaagaagaagaaaaaaaagagttgttttgtgaatggttgattttgagagtttttgattgattttttagatttatgaatatttggattgtatatttgattttattatattgttagggtaagtgttgtataaaggtatttttagattttttattgtatataggtggtttttgttagtttatttttgtgtgtgttttggaggtgttgttaaatttgggggtagtattaggagatatgtttgaaaaagatatttttatttagattaaattattaatagatttttaattttttttaatttattaaagatattattatttggaaataggtatatattatattttttagttaatagttgttattttgttatattattagatatttggggttgttgttttttgaggtatttagagaattatagaattttttagtattgaaagatttgaaagattgtagtgtttttattttaattgtgagatatgaagtaatttttttaaatttgtgatattaagatatggtataataaagataagattaaaggattttggatttataattatgttttttttgttttttttatttttaaatatatttatatatttatttttgtaaatagttgttttgttaagtgggaaatgaatgtttttataaggtttaaatttgtgaatatattattgattagtatagagttggtttataatagttttttaattaaagtgttttatatgtaattggtttaaattttttaagtattaaattaaaataattttttaaagaatgaaattattttagaagaggatttttatatagtatttttgagtagtaattgatgatgttgttgaatttagatgttgattggttttttgatatgagattatttaatttaggagtaaggaaattagtaattttttttttataatttggaatgtgggtggaggggggttatagttttttttgagtgagatttgtttgtttttttggtttttggttttgtttttttttttagtatggtgtgtttgaagttttttggaggttttagtttggtagtgttgatagtgatattgatggtgttgagtttttgattggtttttgttggggatatttgatgtaagagtatattgagggtgttgagttattatggggtgggggaatatagggagttgtgttaatattgtgtttaggttatgttttttaagaaattgtgaggttttttttagagattgtttatttttattaagggattgtaaattattttttttataaaaggaatttggttatttgttttttttatgagatttgtgtaaggggtttttgtataggttatttttttttaaatttttattaataaaatttttgtattatatgtatttagggtttttagaggatttggaaataaggatgttaaaataaattttttatatagtaattttttttattatgttgatttatgttagataaaaggaggtttttattgaaaattttgtgggagttaagggaatttaaaggg

SEQ ID NO: 100 - DNA, 2500 bp, Artificial Sequence
  chemically treated genomic DNA (Homo sapiens)
ttttttgaatttttttgatttttataaaatttttagtaaaaatttttttttgtttgatataagttaatataataaagggaattgttgtatggggaatttattttagtatttttatttttaaattttttaaagattttgagtatatgtgatgtaaaggttttattggtggagatttgagaagaaatggtttgtataaaggttttttatataagttttatggagagggtaagtagttaagttttttttgtggaggaaataatttgtgattttttgataaagatgagtaatttttgaagaaaattttataattttttaagggatatggtttgggtataatgttaatataattttttatatttttttattttatagtagtttagtatttttaatgtgtttttatgttgggtgtttttagtgaaagttagttgggagtttagtattattagtgttattgttaatgttgttaagttggagtttttagggagttttagatatattatgttggagaagaggataggattaggggttagaggagtaggtaagttttatttagggagaattatgatttttttttatttatattttaaattatagggaggaagttattgatttttttgtttttggattgggtaattttgtgttggagaattaattagtatttgagtttaatagtattattagttgttgtttagagatgttgtatgaaggtttttttttgaaataattttattttttaaaggattgttttaatttagtatttgaaaggtttgaattagttgtatgtaaaatattttaattggggagttattgtgagttagttttgtgttggttagtgatgtgtttataagtttgagttttgtaagagtatttattttttatttgataagataattgtttgtagaagtgagtgtgtgagtgtgtttaagagtaaaggagatggagggaatatggttgtaaatttggagttttttaattttgtttttattgtattatattttaatgttatagatttgggaaaattattttatgttttatagttgaaatgaaggtattgtgattttttaggttttttaatattggaaaattttgtgattttttagatgttttaaggagtggtagttttaggtatttgataatatgatagaatgatagttattgattagagagtgtaatatgtatttatttttaggtagtgatgtttttaataagttaaaggaaattgaaagtttgttaataatttaatttgagtaaaaatattttttttaagtgtgttttttgatgttgtttttaggtttagtggtatttttagaatatatataggaatgggttaataggggttatttatgtgtaatggagggtttgaaggtgtttttgtatggtatttattttaataatgtgataaggttaagtgtgtaatttaggtatttgtgggtttgagagattgattaaagatttttaaagttagttgtttatagaataattttttttttttttttttttttttgagatagagttttgttttgttgttttggttggagtgtagtggtatgattttggtttattgtaatttttgtttttttggtttaaataatttttttgttatagttttttgagtaattttgattataggtatgtgtttttatgtttggttaattttttgtatttttagtggagatggggttttattgtgttagttaggatggttttgattttttgattttgtgttttatattagtagtgtaattttaaattgttggggttattggtgtgagttattatgtttggttataattttgttttaaaataatgaatattttatatgaagagtgtttagttttttatttttggtttttattatgatttttttatttgattgaggttatagtattttattattatgttttttttgttttattataagggaggatataagatgattttgttaattaatatatttttgaatgtttaggaaagagaatattagggaaaattatgaattatattagttgatgtaattatataatattaaatatattatatatatttagataattattatgttttttattaatataaatgtaatatttaagatttagaatggattttaaagtataattatatttatagtgttttgtattaatttatatgttattatataggtatttattttttataggttttagtgtttttaggggtaggatttttattatgttgttgtaaaaatgagtattttattttatatttagaattgtattaagtgttttttatattttatatttttattttatttttatattaatttattaaaataaatattttttttatgtttataggtagagagaataaaataatggagatgaaataatttttgtaaagatataaagttagtaaatggtatattatagattgaattaaattatatattttttaggtttagttattatattataattttttatattttatttttgagaataatgttttatgtattaaaattatt

SEQ ID NO: 101 - DNA, 2500 bp, Artificial Sequence
  chemically treated genomic DNA (Homo sapiens)
tgtttgttttggttttttaaagtgttgggattataggtgtgagttattgtgtttgattttttgtttttttttagttttttttgggattgtgtattatttgtattttttggtttttttttgtatttgttttttttgttttttttttgtttttttttattttttggataaattagtttttttgaggtttttgggtttttgggttgtttttgtgaatggtattggaaggttgttttagtgtggttgttgaggtagttattttttttggtgttgggggtggattttaggtttttgaagttttgtttttttttggagttgatgtgtttttagtttttgggttgtagtttttggagttggggttttttttttttgggatttggaggtggtgttttttgttattgtgaggattgtggggggttttgatttttaagttgaggggttggagtttgtaggttttgggtagaggattttttttgtgatttttgttatttttagtttattttttttttgtttttggttttgggggttttttttttttttgtattttatttttattaatgattaatgatttaaggatattagatttttttttattttttttttgtttattttatggtgttttgggtttttttgtttttttagttttttgttatttttttttgtgtgttgttttttgatttatttttagagtgttttttgtttttattttttgtttttgttattgaaggttttttttgttttttttatgggttttttttgtaagtagtttttattttgtgttgtttttatgtttttttatttttaaatgtttttgattttaattttttggtgttgttttttgtttgggggggttttttttttattttatttttttttagatttttaaggagagttttgatgttaatggtagttgggttttaggtagggtgtagggtagtgtagatgtttttttttttttagtgtaggtgtttgttttgggttttgttttattgtggttttttttttatttttttatttttagttttatttttttgaggattttattttttagtttataggtgttggattatttttttttggtttttttgtttttttttattttgggattttgtgttgtttttattttttgtttagttgtttggggtttttagtaagtttttattttttagtgggaaagtgggagtgttggagtatatgatagtgttgagaattttttttaagttttatttttttttagagtattttttttttttgtttttattttattttaagtttttttatagttatttttgttttatgtttatgttgttttttagtttttgttttgtttattttttttttttaatttagatttaaaataggttgttgggttagttgttttttgattttttttttttttttttggttttttgattttagtgggtttttattttttatattgtatatttaaaatttgttttgtttgtttttggggtgttattgttttttttttagtattattttttttggtaggtttttttttaggttgagaatttttttttttattttggttttttttttttggttagtatttttattttttgttttgtttttaatttttaatttttgtttgggtatgtagtagatatgtatgtatatatttatggggtatatgggatattttgatataggtttataatatgttataattatattagggtaaatgggttatttattataataagtatttattttttttttgtgttataaataattttattatgtttttttagttatttttaaatgtataataaattattgttggttgtatttattttgttgtgttatttattagattttatttattttaattatatttttgtatttattaattatttgtatttttttattttttattattttttttagtttttggtaattgttattttattgtttttttttatgaggtttattgttttaatttttggttgttataaataagtgagaatatgtgaagtttgtttttttgggtttggggtttattttattttatatgatgatttttagttttttgtaaatgatatggtggttgaatagtattttatatatatgtgtgtattatattttttttttttatttgtttgttgatggatatttaggttgtttgtagattttggttattttgaatagtgttgtaataaatatggaaaagtagatagttttttaatatattgatttttttttttttgggtatatgtttaatagtgggagtgttggagtatatgatagttttattatatttttagtttttggaagaatttttatattattttttatagtggttatattagtttatgtttttattaatagtgtataagggtttttttttgttatatttttgttaggattttttattgtttgttttttggataaaagttagtttatttggggtgggatgatattttgtaggagttttgatttgtttttatttgatgatgaatgatgttgagtattttttgatata

SEQ ID NO: 102 - DNA, 2500 bp, Artificial Sequence
  chemically treated genomic DNA (Homo sapiens)
tatattaaaaggtgtttaatattatttgttattagatgaaggtaaattaaaatttttatgagatattattttattttagataaattggtttttatttagaagataggtaataaggaattttggtgaggatgtagtaaaagagaatttttgtatattgttggtgggaatgtaaattagtataattattgtgggaaataatgtggaggtttttttaaaaattaaaaatataatagagttgttatatgttttagtatttttattgttaggtatatatttaaaagaaaggaaattggtatattaaagagttatttatttttttatgtttattgtagtattatttaaaatagttaagatttgtaagtgatttaagtgtttattaatagatgaatggagaaagaaaatgtggtgtatatgtgtatgtggagtattatttagttattatgttatttgtaaagaattggaggttattatgtgaagtgaaataagttttaggtttagagagataaattttgtatgtttttatttatttgtggtagttaaaaattaaaataatggattttatggggagagataatagaatgatgattattagaggttgagaagggtagtggggagtgggggagtgtggatggttaatgggtataaaaatatagttagaatgaataagatttagtagatagtatagtagggtgagtatagttaataataatttattgtatatttaaaaataattgaaagagtataatgggattgtttgtagtataaagaaaggataaatgtttgttgtgatagataatttatttattttgatgtgattatgatatattgtaggtttgtgttaaaatattttatgtattttataaatatatatatatatatttattatgtatttaaataaaagttaaaaattaaaaataaagtaaggagtgggggtgttggttagagagagaaaattaaggtagagggggagatttttagtttgaggaaggatttgttaaaaggagtaatgttggagggggagtagtggtattttaagagtaggtaaaatagattttagatatgtggtgtggggagtgagagtttattggggttaaggaattaaaagaaaagaaggaaggttaaggaatagttggtttaatagtttgttttaggtttgggttggggaggggagatgggtagagtaagaattggagggtggtatgagtatggggtaggagtgattgtgggagaatttggggtagggtgaggataggaggggagggtgttttgggggagggtggggtttgggaaagatttttagtattgttatatgttttagtatttttatttttttattgaaagatgagaatttgttgagggttttaggtagttgggtaagagataggagtagtataaggttttaaggtggagaggggtggagggattagggagggatggtttagtatttgtgggttggagggtggggtttttaagagggtgaggttgaggatgaaggagtggggaaggggttataatgaggtagggtttagagtaggtatttgtattggaggggagggggtatttgtgttgttttgtgttttgtttaaggtttaattgttattagtattagggttttttttaggggtttggaggggagtgggatggagggaagatttttttggataaaaggtagtattagaaagttagagttagggatatttgggaatggggaggtataggggtagtatggagtgaaggttgtttgtaggaaaggtttataaaggaggtaggagggatttttagtggtgggggtgggggatgaaggtagaggatattttagaaatggattagagaatagtatataggaaggggtagtagggagttgggagagtaaaaggatttagggtgttgtaagatgggtagggaggaggtgagagggaatttggtgtttttagattattggttattagtaggggtgggatgtgagagaggagaggatttttggagttggaggtgaggggagaatgagttggggatgatagaagttgtaggaagaattttttgtttggagtttgtagattttaattttttagtttgagagttaggattttttatagtttttatagtagtaagaagtattatttttgggttttaagaaaggagggttttaattttaggagttgtggtttaggagttgagaatatattggttttgggagaggataggattttagggatttgagatttgtttttagtattgggggaagtggttgttttagtggttgtgttggaatggttttttaatgttatttataggagtagtttgggaatttaggggttttagaaggattggtttgtttgaaaagtgagaggagatggaggagaggtgaggagagtaagtgtaggaggagattagaaaatgtgggtgatgtgtgattttgaggaggattgaaaggagatgggaggttgggtgtggtggtttatgtttgtaattttagtattttgggaggttgaggtgggtg

SEQ ID NO: 103 - DNA, 2500 bp, Artificial Sequence
  chemically treated genomic DNA (Homo sapiens)
ttagggttggtttttaggagtttttgggaagttagtaaatggaaatttggggaggagggattggggagttagtgggtggggagggtaagtagggttgggggagatgtgaagagtgttatttttttgttttaggatggagaggtgtattgtatagatgtttgttattatggtaatattagttgttttattaattatttgtgtgattttaatattatttttgtttgggtttttatgttgtattaagatttgtgatttttatgtattgttttttttagtttttgagatatttggattggggaggagttagggtgagattttaggggtttttaggggttttgttagggggtgggagatgtagtaaatttgggatttgaaggttggtatgtatttggtgtttaggtatggagtagtgtagagttttttagattttagtgtatataagtattttttggaggatttggggaaatagttttgtgttttttagagagattttgaattagtaggtttgggatggggtttaggattttgtatttttaataagtttttaggtaatgttgatgttgaaagtttatagaatatataaggggtttagattttatttggagaagataggttgggtgttgggttttttttagggagtaggatttatagggtttttggggtgggtttttggtggttgggtttaggttttataagtttttgtttttttttgataggtttgattatggtgattgtttttgggatattaaaagtaaatattttatttgttaatgtggttttgagaagtgtaagtatttagttgaagttattgttttggagtagagttgtttggtttgtttggatttatattttgagttgttgtttgagtttggttttttgttttttgttaatatatgagaatggattatattttttttttttagtatggatggttatagtttagttgttttttttgttattagttgtttgtagtttatgtttgggggtgttgttattttttttttttattatttttttatatatttttgattagagattttagttaggttttggaggtttgatagttttttttttttagagttggtttttttttgggagggtaattttagggttggttattttttgtgttttttatttttagttgaagtttgatgaattgaagttgggtttttatgttaattggttttttttgtttttaataaatgttgggtttggtaataaattgtgatttttgtgttggggtggggagaaagtatatttggttagagggaatgtgggtttaagggttagaataggatgggaagtaggttggataggtgtggttggtgtgatggttgtttagtgtggggtagggaggtggggggttattatgaagatttagttttataggtatggtggttgatatttataattttagtattttgggaggttaaggtaggtgaattatttgagattaggagtttaagattagtttggttaatttggtgaaattttattttttaaaatagaaaaaatttgttgggtgtggtggtaggtatttgtaattttggttattttagaggttgaggtaggagaattgtttgaagttaggaggtggaggttgtagtgagttaagattgagttattgtatattagtttgggtaataagagtgaaattttattttaaaaaggaaaaaataggtttaatttttatattttaatttttggtgggagtgtgttgggagtgtatggtagttaaggtagtttgtgagattataaagtgtttttttattagagtatgttaggttgtttattgtggtttgtagtgtttttaggaaatagttttgagtttttgttttaggttttagttttttagtttgttgggtataaagttgagaagaaggaattagagtgtgttggggattataggtgggggtggggttgtgatgtgtgggagggtggggtgggtagtaggtgagatgttaggtttttagggttttaattattttggagattgagttatggggggaaagtagtgggatgaggatgatgaggtttatggtgagattggggtgaggtttgggattttgtggagggaggggaggatgggtattttgggaatggtgtttggggttggttttagggagaggaattaaggagagtattgtgtttttgaggggagggtttgggaattgggagttatggagggagggagttagggttttgggaggaggatggggtttgggggttggggttgttgttggggagtttatggggagtgaagttgggtgtttttgaagagttggggttgaggtttttgggaggaggggggtattttaggtttggattttgggtttttaagggtagggttttaggaaataaagttgagatggaaggtggtaggttggggttttgagtagaatagggttggatgttgggagtgttttgtgttgtagagtttgtaattagtgaggttagggtttttgtaaggaggaggaggtttagtttggagtttgggttt

SEQ ID NO: 104 - DNA, 2500 bp, Artificial Sequence
  chemically treated genomic DNA (Homo sapiens)
agatttagattttaggttgaatttttttttttttatagggattttggttttattggttgtaggttttgtagtataggatatttttagtatttagttttattttgtttagggttttaatttgttattttttattttggttttgttttttagggttttgtttttagggatttagagtttaggtttgaaatatttttttttttttaaggattttagttttaattttttagaggtatttagttttattttttatgggttttttagtaatagttttagtttttgggttttattttttttttaggattttgattttttttttttatggtttttggtttttgggttttttttttagggatatagtattttttttagtttttttttttggagttagttttagatattatttttaaagtatttgtttttttttttttttatagggttttgggttttgttttagttttattgtaggttttgttatttttgttttgttgttttttttttatggtttagtttttggagtgattggagttttggagatttggtgttttatttgttgtttgttttgtttttttatatgttatagttttatttttgtttgtggtttttgatatattttagttttttttttttaattttgtgtttagtgggttggggagttggagtttgggatgggggtttagggttattttttgggggtattatggattatagtgaatgatttggtatgttttgataagaaaatgttttataattttgtaaattattttaattgttgtatatttttaatatgtttttgttaaagattaaagtgtggaaattggatttgtttttttttttttgagatggagttttgtttttgttgtttaggttggtgtgtagtgatttaattttggtttattgtaatttttgttttttggttttaagtggtttttttgttttagtttttggagtagttaggattataggtgtttgttattatgtttagtaaattttttttattttgaaagatggggttttattaagttggttaggttggttttgaatttttgattttaggtgatttgtttgttttggttttttaaagtgttgggattataggtgttagttattgtgtttgtgaaattggatttttatagtggttttttatttttttgttttgtattgggtggttattatattagttatatttgtttagtttgttttttattttattttggtttttggatttatattttttttagttaagtatgttttttttttattttaatataaaaattgtagtttattattaaatttaatatttattgagaataaaaggaattagttggtatagaggtttgattttaatttattaaattttaattgaggatggggaatatggggggtggttagttttgaagttgtttttttagggaggaattagttttgggagggaggggttgttagatttttagggtttggttgggatttttggttaggaatgtgtgaaagggtggtggggagagaagatggtagtatttttaggtatgggttgtgagtagttggtggtagaggaggtggttgagttgtggttatttatgttggggagagagggtgtggtttgtttttatgtgttgatagggggtagggagttgagtttgggtagtagtttagggtgtgggtttaggtgggttagatggttttgttttagggtaatggttttggttgagtgtttgtattttttagagttatattggtaggtgaaatatttgtttttgatgttttagaagtggttgttatagttaaatttgttagaggaaaataggagtttgtgggatttggatttagttattaagagtttattttgaagattttgtggattttgttttttgagagggatttgatatttaatttattttttttagatgggatttgagttttttgtatgttttatggatttttagtattagtattgtttggggatttgttagaaatgtagaattttgggttttattttaagtttattgatttaaaatttttttgggaggtataggattgtttttttaagttttttaggaaatatttatgtatattgaaatttgagaagttttgtattattttatgtttggatattaggtatatgttagtttttaggttttaggtttgttgtattttttattttttggtagagtttttagagatttttagagttttattttagtttttttttagtttggatgttttgggaattgaagaaggtgatgtgtggaaattgtaggttttggtgtagtatgaagatttggatgggaatgatgttggggttatataggtggttgatgaagtggttgatgttgttatagtaatgggtatttatgtagtatatttttttattttggggtagggggatggtattttttatattttttttgattttgtttgttttttttatttattgattttttagttttttttttttaggtttttatttgttgattttttagaggtttttgaaagttagttttgg

SEQ ID NO: 105 - DNA, 2500 bp, Artificial Sequence
  chemically treated genomic DNA (Homo sapiens)
ttttagtttttgtttttttttttttgaaatttattaagttatttttttttttttatttatttttagatttttttttttatttttttagattattttttaaagtttgtagtttttaatttgttgtttgtattttttttgtgtttttttgaagttgaggagtttttttatgttttgggagttgatttttttttaagaattttttattttatttttaatttattttatttttaatttgttttttttttttgtagattgatttttttttttttttgtttttaggttttttgttttgtttttttagttttttaatttttttttttttttatttttattttttttaaggaaatatgttttaaattgttattgaatgaagtttgttttttttagtgttttgtgtgaaattaaggagaaaattggtatgtgggttttttttggattgtttaattttgggaatagaattttgtttattatagggttagagtgtgataatttggggttttgaggaaagtaaggagttagggggattggggaaggaattaaagtttgggaatttggttttttaggaagtattaggaggattgagtattgggtattggggtttttgggtttttaagtttatttgtttgtatgttaggttttagtatttggagtttttaggaggaggagttggtggatttatagttgatgtgtttggataatatgtttttggtagagggtgtggttgggtttgagaaagggggtggtttagtagtagtagttgtagttgttgtagtttttggtggtggtgtgttttttgataattttattgaatatttggattattgtagtaaatttgtttagatttgttatatatattatttggagttggagaagtatgagtaggtaaggagaggaggtttgggtgggtggagggaagggtttttgtaggggaattttatggttaaagggtttttttttattagtttattggtttttattataggtatgtaatgagtttatgatttatgttatgaatttgttgagggagtagagttgtattaggtttgtggtttttaaagagatggaatgtatggtgagtattatttattgaaagtttagtgttatttagatgtagttgaagtagagtatttgtgaggttgtgatgattttgtgtttttgttttttggatgttaggtgggtttagggattttaggttggtttttagtattgggtttttttttatttttttttaagattttgagttgttatgttgtataatatggtattttatgataatggtgattttggggttatgttatgtgatagttttgttaggatattaatattttttttattgttttttttttttttttgtagatgaaagtgttgtaattttagtaaataggttattgaggttttaaatgagtatttttatttttatttgagtaatttatattttagtgaggaggttaaggaggagtttgttaagaagtgtggtattattgtgttttaggtattatggaggttgtgggaggagttgttaggtaaagtgtatgtattttagttaggtgtagtggtgtgtttttgtaattttagttattagggaggttgaagtgggaggattatttgaattggagattagtttgggtaatagtatagtgagattaggaagtaaaaaaaaaaaaaatgttgttatttatattttatttagtgaaggattttagaggtaaatgtttttatttgatttttttttttgttttataggtttttaattggtttggtaataagaggatttgttataagaaaaatattggaaagttttaagaggaggtaaatatttatgttgttaagattgttgtgttagttatttaggggggttatagttgtattagttttttgatattttttttttttgtaggtggattttattgttattttagttgattgttttgtatattttttgtttttgtttttattttttatttaggtaggattatagtagagagggggttttttggggtgagagggattgagttgagataggttggagatgttaggggatagaggttattttagtgattttagttttgtttttttttttatgggtggttaaggaatagtttgttttttttgtgtgttggaatgttattttgtggataattggagtatagtagtatgtttttataagagttgagagttgtggtttattttttattattatgggttttattatatttttttttttttgtttttataaggttttggtggtttttttaattttttaggatttggagatatgtttttggggatgtttgggtttaatggagatttttattttgttttttaggttagatgtttatttttttttgaatagggttttttttaattttattttttttattttaggatataagattttttttttttgaggtttttttttattgttatatttttttttgttgtttgtaggtggaattattttgatatttgatggggttagggggttatggggataattttg

SEQ ID NO: 106 - DNA, 2500 bp, Artificial Sequence
  chemically treated genomic DNA (Homo sapiens)
tgaggttatttttatagttttttggttttattgagtgttggagtgattttatttgtaggtagtagaggaaggtatgatagtgaagagaagttttagaggaaagaggttttgtattttaaagtagaggaaatggagttggggaaagttttatttgagaggagatgggtatttgatttgggaagtagaataggaatttttgttgagtttaggtatttttagaaatatgtttttagattttgagagattgaaagagttgttagagttttgtgggggtagagagggaagagtgtaatagagtttgtgatggtagaggatgaattataatttttaatttttgtggggatatgttattatattttaattatttataaaataatattttaatatatagaaagagtaggttgttttttggttatttgtgggaagaaaggtagaattaagattattggaatggtttttgttttttgatatttttagtttattttagtttggttttttttattttaaaaggttttttttttgttatgattttgtttagataggaagtgggaataaaagtaggaagtgtgtaaaatagttagttggggtgatagtgggatttatttgtagaggaagggggtgttggggagttggtgtggttgtggtttttttgggtgattgatatggtggttttgatagtatagatgtttgtttttttttggaattttttgatgttttttttatagtgaatttttttgttgttaaattagttggagatttgtggggtagaaaggagggttaggtagaaatatttgtttttgaagttttttattgaataagatgtgagtgatagtattttttttttttttgttttttggttttattatgttgttgtttaggttggtttttaatttaagtgatttttttattttagtttttttagtagttgggattataggaatatattattgtatttagttgagatgtgtgtattttgtttgataattttttttgtaatttttataatatttgagatatggtgatgttatattttttggtaagtttttttttggtttttttattaggatatgggttatttaggtgggagtagaaatatttatttaggattttagtggtttgtttgttgaagttatggtgtttttgtttatagaggagggagaagagtggtgaggaggatgttgatgttttggtagggttgttatatggtatgattttagagttattattgttatggagtattatgttgtgtagtatggtagtttagggttttggagaggaatgggaaggagtttagtgttgggggttagtttggggtttttgggtttatttggtatttaggaaatgggagtgtaggattattatagttttgtaggtgttttgttttagttgtatttggatggtgttgaatttttgatggatgatgtttattatgtgttttatttttttgggggttatgggtttggtgtggttttgtttttttagtaggtttatgatatgggttgtgaatttattatatgtttgtagtgggggttagtgggttggtgaggaggagttttttgattatgggatttttttgtaagagtttttttttttatttatttaagttttttttttttatttgtttatatttttttagttttgagtggtatatgtgatggatttgggtaagtttgttgtgatagtttgagtgtttgatggagttgttaggggatatattattattagaggttgtagtggttgtagttgttgttgttgagttgtttttttttttgggtttagttatattttttgttagaagtatgttgtttaagtgtattagttgtgggtttattggtttttttttttgggagttttgaatgttgaggtttagtatgtaggtgagtggatttagggatttagagattttaatatttagtgtttagtttttttggtgttttttggagagttaagtttttaggttttggttttttttttagtttttttgattttttattttttttagggttttaagttgttatattttagttttataatgaatagggttttgtttttagagttgagtaatttggggggggtttatatattagttttttttttgattttatataggatgttaaagagagtaggttttatttggtggtagtttagggtgtgtttttttgggaggagtgggagtggggaaagagaaaagttgaggagttagagaaatagagtagggggtttgagaataaggagggaggagggttagtttgtggagggaggaagtggattgggggtggaatgagttgggggtggaatgaggagtttttgggaaaagattagtttttagagtatggggaagttttttagttttagggagatatagggaagatgtaggtagtaggttaaaggttgtgggttttgggagatggtttagaaaggtaggaggaggaatttgggagtggatggagaaaggaaagtgatttggtaggttttagagggagagagatagaagttgggg

SEQ ID NO: 107 - DNA, 2500 bp, Artificial Sequence
  chemically treated genomic DNA (Homo sapiens)
gttatagaaatattgggtatatgtgaagtgaggtggtaattgtttagtgttaatatttttggttttttaagatttagatttggaggaggaagaggaggaggaagatttggtgttgatttgtgaggatgatgaagatgaagaattagggggtagttttagggttttagtggggggagggtttgaggttatttttagtataagtgatgtttgtattttgagtgagtttttagataagggggaggagtaggttaatttttgtgagttttttaatgattttggtttatatgagggtgggggttttgtggtaggttttgatgatttaggggggttaattttttttttttatgtttttttttattttttttgattgtttttttttttggatatgtagggtaattagattttggtttttttgttgttgtttttatttttatttttataggtttttggttaattattagggaattaagtagaatatggggtagtgattgtggggggtatgttggtggggagtttgggtgtgttgggtagtgttggtggggtttttggagggattggtagtggggatgggaataagatttttttgtgttattgtgggaaggtttttttttataagagtatgtgggattggtatgtgaatatgtattttaatttgtggttgtttgattgttttgtgtgtaataaaaagtttaagatgaagtattatttgattgagtatatgaagatgtatataggttttaagttttatgagtgtggagtttgtgttaagaagtttatgtggtgagatagttttatgtgttattgaggatattgtgagtgttggtattgtttgggtggggttggggttgtatttgggtttgggatttttatggggttatttttgttgtttaagagagagttttttggagtgggtgggggtagtggtgatgaagtgagtgtggttatgtttttgtttagtagatgtgtttggtttttatttagagtttataaggtggagatgggttttggtggaggtggaggagtaaattgaaggggtaggttattggggtggggtagtttttgggaaagggaataaggagtatgatgtaagggtgttgtggtttttgggtgattttttattatatttattgtttttttttatttttgtggatttgtatatattttggaaggggaattatagttttattattgtttgtttattttattatttaattttttttttttaaggtatttttagaattaaattttttttttttttttgatgggtatattgaagtttttgttttatagagtagattgtatatggagggagggagagggggtgtgttgaatattttgtagttatagggttaggggttaggtggttgtagtttgtgtttgaagtttgtgtttgtgttgttgtggagataaggtttttgagttttatttttgttttagaatttatttttttttaaggatgtgttttttatttttattttgtttttttttgttatttttgattttttgtggaaatttttaatttggtttttatggaggagtgggtggagataaggagggagtaagttgtaggagtataaggtttttattttttttaatagtgattaaaatatttattggttatttatttggttttttgataatttgtgtgtttgttggggatgtggtatagatagggggaagttggagtaatggtttttgggtaagtggatgttggagagtatatataggagttggggggtgggggagggtttggggttggggagggtttgaatttggggttgttgggtagtttaggagggtgtggtaaggttggggtgttttggtgagaattggagaggatttatttgggtttttgtttggttagtggggaaatattggttttttaggtatttttatttaattagagtggggatttttattgttttttatgttgttttttggaggaaagtgaaagtgaaaggaggaagaggaggttttatggttgaggaggttgtagtgttatgaagtttttgtttttgttttttgttgtggttttgggtgagtgaattttgtgatttattgtttaagaattagagggaagtggagggaggtggttttattggagttgatgttagggtgggagtggggtaggttattagatatataaattgttttttatttgtgtttttatatgttaggtttggtgattgttgttttagtaggatttgtggtgattgagtgttggtttgtggaggatgtgagtggaaagggtttggttaagagatttggtgtattgttgttgtgttagggattgggggaattgttgttttggttggattttgattttgagttttattttagtgtatatggtgagtttttagggatttgttgtttttttatttttgttgtttttattgaaatttttttttttttagatttggtagtgattttaggttttagttttttttttgtaaagtgagttttattatggggtagtttgtgtatttgaagttttttgaat

SEQ ID NO: 108 - DNA, 2500 bp, Artificial Sequence
  chemically treated genomic DNA (Homo sapiens)
gtttggggaattttaaatgtatagattattttgtagtgagatttattttataaaggggaagttgaggtttgaggttattgttggatttaaagaggagggggttttggtggaggtgatagaggtaggggggtggtgagtttttagagatttattgtgtatattgagatagagtttagggttgaggtttggttggggtggtggtttttttggtttttggtgtaatagtagtgtattgggttttttggttaggttttttttgtttgtattttttatgaattaatatttgattattgtgggttttgttgagatggtggttgttaggtttggtgtatagggatgtgagtgaggagtggtttgtatgtttggtgatttgttttatttttattttggtattggttttagtggggttatttttttttgtttttttttagtttttgggtgatgagttgtggggtttgtttatttaaagttatagtgaggagtagagatagggattttatggtgttgtgatttttttagttatgaagttttttttttttttttttatttttatttttttttaaagggtggtatgaggggtggtggaaatttttgttttggttaggtgaaggtgtttgggggattggtgtttttttattggttaggtagggatttgggtagattttttttagtttttattaggatattttagttttattgtgtttttttggattatttagtagttttgagtttgagttttttttaattttaggtttttttttgttttttaatttttgtgtgtgttttttaatatttatttgtttgaaaattattattttggtttttttttatttgtgttgtgtttttagtaaatatatgggttattgggaagttaagtaaatgattaataaatattttaattattgttaaaaaaaataaaaattttgtatttttatgatttattttttttttgtttttatttatttttttatgagaattgagttgggaatttttatgggaagttgggggtggtggggagagatagggtagaaataaagagtgtatttttgagagggggtaggttttaggataagggtggggtttaaaggttttgtttttatgataatataaatatagattttaggtatagattataattatttgatttttgattttgtgattgtaggatgtttaatatgttttttttttttttttttatgtgtaatttattttgtggagtaggggttttagtgtatttattagagggaaaggaagggtttagttttggaaatattttgggggggaggggttgagtagtagaatgggtgggtgatggtgaaattgtggttttttttttagaatatatataagtttatagagataaaggaagatagtaagtgtggtgggagattatttgggggttatagtgtttttgtattgtgttttttatttttttttttgaaagttattttattttagtagtttgtttttttagtttgtttttttatttttattgaagtttatttttattttgtggattttgggtggggattagatatgtttgttggatgggggtgtggttgtatttgttttgttgttgttgtttttgtttattttgggagatttttttttggatggtaaggatggttttgtgggagttttaggtttaggtatggttttgattttgtttaggtggtgttggtgtttatagtgtttttggtggtgtatgaagttgttttgttatatgaattttttggtgtagattttgtatttgtagggtttgagatttgtgtgtgtttttatgtgtttagttagatggtgttttattttgaattttttgttgtatatggggtagttaaatggttgtagattgaggtgtatgtttatgtgttggttttgtatgtttttgtgggagaaggtttttttataatggtatagaaagattttatttttgtttttattgttagtttttttagggattttattaatgttatttggtatatttaggttttttattgatgtgttttttatggttattgttttgtgttttgtttggttttttggtggttggttaggagtttgtgaggatgaggatgaagatgatgatgggaagattaggatttggttgttttgtatgtttaagggaaggagtggttgaggagggtgggagggggtataggaagagggagttggtttttttgagttattaagatttgttataggatttttatttttatatgggttaaagttattggaggatttatagaagttgatttgttttttttttttgtttgggggtttatttagggtatggatattatttatgttgagggtagttttaggttttttttttattggaattttggagttattttttagttttttatttttattatttttataggttaatattagattttttttttttttttttttttttagatttgggttttggggaattaggggtgttggtgttgggtaattattattttgttttatgtatatttagtgtttttgtggt

SEQ ID NO: 109 - DNA, 2500 bp, Artificial Sequence
  chemically treated genomic DNA (Homo sapiens)
ttttattttgtttttattttgattattttaggggttgttattattttttttttggttattttaatagtttaagttttttttgattaagttattggagtttttaaagaaggaattttaggtattttaggggattatatttttttgaattatttttgatgtttgtttggttgaggattttaagtttgtttaggaatttttagtttaaagttgttggtttgttttattagttaggtggggtttagatttatatatagaggaagagtaggtatatggaggagtttgggggatgattagaggtagggaggggattatttatgaaggtaaaaaaattaaattatttatttatggaggatggagagaggggaataatagaagaatatttaaggagaaatagagataggtttaagagatgaagagtgagagggtatgtgtataaggttgattaagagagaaagaagtaggtatgagggattatagggttttagaaggtagggaaaggttttgaaagttagttgttgattagagttttatatggaggtatttgtatttttgatgaagtttaataaattttttttttttgaaatgttgtttgtttgtgtgtgtgtgtttgggagtgagaattttttagtttatttaaggaatggagggagggatagagggtttaaagggagtaagagttgtggggagaataaaaggataagggtttagagagttttagggatatgtgatggatttattaggtgaggttgttagattgttgtaggggaagtaaaggagaagttgagaagatgaaggaaaagttagggtttggaggggtgggggttagggagtttttgggagatatggttatatgtagtggttttgaggaatgggttataggagatttttggggagatgtgattatagtaatgggtaggagaatgtttagggttatggaagttgagtatggggatttttttttaatgaagatagggttatgtagagggttttagggagtgaaagagtttttaggatttttaggtatggaatataggggatgtttaagaagatatggttatatattggggttttgagaagtgagagttttatgaaaaaaattagggattttagagttttttggaagttaagattgaaattagtattatgagtttttgggttagaatgaaagaagaaggtttgttttagtggggtttgtgaatttttgggggtgattttattttttggggttgttttaggtttgtttttgttatttttatttagttttttttgaggttttaagtttgttattaagtttttagttttttttttttgtagggatttaaatataggttttaggatttaatatagtttttttttttaattttgtttttttttttttaaggatttagttttttgaagttttttttagttttagttttattttttttttgtattttgtttggaagttagaaggaaatagattatagatttggtttttaaaagaaatggaggtaataggttttgaggggtatggggatggggtttagtttttagggttttatatataaattagttagtggtttagaagattttttttggaattggagtagggaggatggggagtgtgaggggtatttttgatgtttgtgtgtttttaattttttaaatttttgtttttgtgatggagaagaaattgagatagaaggtgtagggtttattattgttttttttagatgagtttatgggtttttttattaaggaagttttttgttggttgaatgattttttttttgttttttttttgttttagggatatataaaggtagttgttggtatatttagttagtagatgtttttttagtaaggatagtagaggattagttaagagggagagaagtaattatagattttttttgaaaataatttttagatgttatattttttgataagttgttaggtaggtttttttttttttatatattgatttatggttttatttttttttttttggaaaggatattatgagtattgaaagtatgatttgggatgtggagttggttgaggaggtgttttttaagaagataggggggttttagggttttaggtggtgtttgttttttagtttttttttttttttgattgtggtaggtgttattatgtttttttgtttgttgtattttggagtgattggtttttagagggaagaggtgagtgtttggttagtttttatttatttttttatttaaggggaaatggagatgtaagagagggagagagatgggatgggtgaaagatgtgtgttgatagggagggatggagagaaaaaaatgtggagaaagatggggatgtagaaagagatgtggtaagagatggggaagagagagagagaaagatggagagataggatgtttggtatatggaaggtgtttattaagtgtgtatggagtgaatgaatgaatgaatgaatgaataagtagatatataaataagatatggagatagatgtggggtgtgagaagag

SEQ ID NO: 110 - DNA, 2500 bp, Artificial Sequence
  chemically treated genomic DNA (Homo sapiens)
ttttttttatattttatatttgtttttatattttatttatatatttgtttgtttatttatttatttatttatttattttatatatatttagtgagtattttttatgtgttagatattttgtttttttattttttttttttttttttttttattttttgttatatttttttttgtatttttgtttttttttatgtttttttttttttatttttttttattagtgtatattttttatttattttattttttttttttttttgtgtttttatttttttttgggtgggagagtggatgaaggttggttaggtatttattttttttttttgggggttgattattttaaagtgtagtaggtagaagagtgtggtggtgtttgttatgattaggaaggagaagaggttgaggaataagtattgtttggagttttggggtttttttgtttttttggggagtgtttttttggttagttttatgttttggattatgtttttagtgtttatggtgttttttttaggggagagagggtggagttgtgggttagtatgtgagaggaagagaatttgtttggtagtttgttaggggatgtggtgtttgagggttgtttttagggggggtttgtagttgttttttttttttttagttggttttttgttgtttttgttgagggagtgtttgttggttgggtgtgttaataattgtttttatatgtttttggggtgagaggagggtggggaaagaattatttaattagtggaaaatttttttggtggagaaatttatgagtttatttggaggaagtggtagtgggttttgtattttttgttttggttttttttttattgtgggggtggggatttggaaagttggggatatataagtattaaggatattttttatattttttattttttttgttttgattttgaggggggttttttgggttattgattgatttgtgtgtaggattttggaggttgaattttgtttttatgttttttaaaatttattgtttttattttttttggggattaggtttgtggtttgtttttttttaatttttagataggatgtaggaaaaagatagaattagaattgggaggggttttagaaagttgagtttttgagggagagaaaatggggttggagggaaaagttgtgttgagttttgaggtttgtgtttgggtttttgtggggagaaggagttgggggtttggtggtaggtttgaggttttaggaaaggttgggtgggggtagtagggataagtttgggatagttttggggagtgaaattatttttgggaatttatagattttattggggtaggttttttttttttattttgatttggagatttataatgttggttttagttttggtttttaaggaattttggggtttttgattttttttatgaagtttttattttttagggttttagtgtgtggttatatttttttaaatgttttttgtattttatatttggaggttttggaggtttttttattttttggggttttttatatggttttgtttttgttaagggggggtttttatatttgatttttatagttttggatatttttttatttattgttgtggttatatttttttagaggttttttgtaatttattttttagagttgttatatgtggttatattttttaggagttttttgatttttgtttttttagattttgattttttttttatttttttagttttttttttgttttttttgtagtagtttggtggttttatttggtgagtttattatatatttttgaagttttttgagtttttatttttttgttttttttatagtttttgttttttttgagttttttgtttttttttttattttttagatagattgggaagtttttatttttagatatatatatataagtagatagtattttagagaaaagaggtttattgggttttattgagggtgtagatgtttttgtgtggggttttggttggtagttggtttttagagtttttttttgttttttggggttttgtgattttttatgtttattttttttttttttggttagttttgtgtgtatgtttttttattttttattttttgggtttgtttttgtttttttttggatgtttttttattatttttttttttttattttttataaataaataatttaatttttttgtttttataaatagttttttttttgtttttagttattttttaagtttttttatgtgtttgttttttttttgtgtgtggatttaggttttatttagttggtgggatagattaatagttttgggttgggaatttttaggtaggtttgaaatttttagttagatagatattagggatggtttagggaggtgtggttttttgggatgtttagaattttttttttgaaagttttggtgatttgattagggaagatttgagttgttggaatggttaaaggagaggtggtgatgatttttgaaatggttagaatggaggtagaatgggg

SEQ ID NO: 111 - DNA, 2500 bp, Artificial Sequence
  chemically treated genomic DNA (Homo sapiens)
tgggagtagatatggttttatgagatgaggttagtttggttaggggtttgtatataggagtattatataggtttagttttttttttaggagagagattgagatttgtttttttttttttattttaggttagatagatgtgtggattttttgtagtttttatggtgtgtttgatttgagttgttgtatttgtttttgtgagttaggttggggtgggtttatttgtttagattttatagatgttgagattttttttttttttttatttttagttttggggttttgtttagatgattgtaatgattagggttgttgtgtttgtggttgttgtgtgtgtttttttggttatattggttttagttgtggttggttattttgttttggggattgttaaggttgtgggtgttgtgtgtagggtgtgtgtgtgtgttgggtaggttttttaggttttgattgtagttagtgtttttgtttttgaggttgtagttagaggggatgttgtgagggtgggtgttgtgtgtgtgatttaggttatattggtgatgattgtggtatgaggagttgtttttgtggttgtagttagagggggtgttgtgagaatgggtgttgtgtgtgtaattttggttatattggtgaggattgtggggtgaggagttgtttttggggttgtagttagtggggatgttgtaaggatgggtgttgtgtgtgtgattttggttatattggtgaggattgtggtatgtggagttgtttttgggattgtggtgagggtgggtgttgtgtggatggttgttgtgtgtgttggtttgggtatataggtgaggattgtagtatgtggatatgtttgagggattgttggggttgtgggtgttgtgaggatggtgaatgtatttgtgatatgggttatagtggggatgattgtggtgtgtgtagttgttttggtgattgtaattaaaggggttgttgtgaggatggttgttgtgtgtgttggttggggtatattggaattgattgtggtttgtgtgtttgtttatgtgattgtagaggttgtgggtgttgtgagaatggtgtgtgtgtttgtaatgtgggttatagtggtgaggattgtggtgtgtgtagttgttttggggattgttgtggttggggttgttgtgagagtggttgttgtatgtgttggttggggtatataggttgggattgtggtatgtgtgtttgttttggtgattgttgtgggtgtgggtgttgtgtggatggttgttgtgtgtgtaatttgggttttattggtgaggattgtgggagttgttgttgttttggggattgttgtgggtatggtttttgtgaggatggtgtgtgtgtgtgtgatgtaggttatttaggggaagattgtagtatgtgtagttgttttgggggttgttgaggttgtggttagtgtttagatgggtggtgtgtgtgtgaggatggttattttggtgaggattgtggtgtgaggtagtgtttgaatgattgtagttagtatggtgtgtgttaggatggtgtgtgtatttgttgggaaggttatgtgagtgaggattgtagtatttgtatttgtttttttaattgttatgggaggggttgttgtgaggaagggtgttgtttgtgtgatttaggttatattggttttatttgtgttatttgtatgtgtttggttgattgttggggatgtgggtggtgtgtgtaaggagtgtgtttgtgttatgtgggttatggtggtgaggattgtgggtaggaagagtttttagttagtgtttgttttggaggttgtgggttttgggaattgtgttgggtaggttagtgtgtgtgtgtagagggtttttgaggttttgattgtgttatttagatatgtttaggggattgttgtggttgaggagagtgttatgatggtagttgtgtttgtaaagatgggtatgttggtgaagattgtggagaaggtgagtaggtagttttttttagtgtattttgggattgtgattttgtgaataggagttatggggaagatttgagtttgaggaagagtggagggagagtatgttattttaaggagttagtgtttattaggggtagtagaattataggggtggggttttttagtgggtaggattggtttttagatttttgaggagtaggttggggtttatttagttgtatttagggagattttgtgtttttgaagatggagagaaggtgaaggtgatttaagttttgtttagttttttgttagttattttttattagtagagaggagtgggagttaggatgggtttttttgatgtttttgagtaaaaggggttgtgggtgggggtggttgttttgtgttaattagttttttttaatttatttttttgggtagaggtgttaattattgagggtatgaggatgtattttttggaggagataatagtttggatagagtggattttggtttttggttttgtggatgtttatgaaatttagtttatttttatg

SEQ ID NO: 112 - DNA, 2500 bp, Artificial Sequence
  chemically treated genomic DNA (Homo sapiens)
tgtggggatgaattgaattttataggtatttatggggttaggagttggggtttattttgtttgaattgttgttttttttaagagatgtatttttatgtttttaatggttggtatttttgtttaagagaatgggttagggaaagttggttagtataaggtaattatttttatttatagttttttttatttagggatattgaagaggtttattttaatttttatttttttttgttagtggagaatagttgatagagggttgaatggggtttggattgtttttattttttttttatttttaggagtatagaatttttttaaatgtaattaaatgggttttaatttgttttttagagatttgaaggttagttttgtttattggaaagttttatttttgtggttttgttgtttttggtgggtattggttttttggaatgatatgttttttttttatttttttttaggtttaggttttttttatggtttttgtttatagaattatagttttagagtatattggggaaggttgtttgtttattttttttgtagtttttgttagtatatttatttttgtagatatagttgttattgtgatattttttttggttatggtagttttttgggtatgtttggatggtatagttagggttttggaagttttttatatatatatattggtttgtttggtatagtttttggggtttgtagtttttagggtaggtgttggttggaggttttttttgtttgtagtttttattgttatagtttatgtggtataggtatattttttgtatatattgtttatgtttttggtagttagttgggtatatgtgggtggtataggtagggttggtgtagtttgggttgtataggtagtgtttttttttatagtggttttttttgtggtagttggaggggtaggtgtggatgttgtagtttttatttatgtagtttttttaatagatgtatatattgttttggtatatgttgtgttggttgtagttatttgggtattgttttatattgtaatttttgttagagtagttgtttttgtatatatattgtttatttaggtattggttgtggttttggtagtttttggggtagttgtgtgtgttgtagtttttttttgagtagtttgtgttatatatgtatatgttatttttgtaaaggttgtgtttatggtagtttttgggatagtgatggtttttatagtttttattggtgaagtttgggttgtatatgtagtggttatttatgtagtgtttgtgtttgtgatagttgttaggataggtgtgtgtgttgtagttttggtttgtgtattttggttaatatatgtagtggttatttttatagtggttttggttatgatagtttttaggatagttgtgtatattgtagtttttgttgttgtagtttgtattgtaaatatatatgttgtttttgtagtgtttgtgatttttatagttgtgtgggtaggtgtgtgagttgtaattggttttagtgtattttggttagtatatgtagtggttgtttttgtagtggtttttttggttgtagttgttagggtagttgtgtatgttgtagttgtttttgttgtagtttgtgttgtaaatgtatttgttgtttttgtagtgtttgtggttttggtagttttttggatatgtttgtgtgttgtagtttttgtttgtgtatttgggttagtatatgtagtggttgtttatgtagtgtttgtttttgttatagttttaggggtagttttgtgtattatagtttttgttagtgtagttggggttatatatgtagtgtttgtttttgtagtgtttttgttggttgtagttttgagggtagttttttattttatagtttttgttagtgtagttggggttatatatgtagtgtttatttttatagtgttttttttgattgtaattgtgagggtagttttttatgttatagttgttattagtgtagtttgggttatatatgtagtgtttatttttatagtgttttttttggttgtaattttgagggtaggagtgttggttgtagttggggtttgagaagtttgtttggtatatatatatgttttgtatgtagtgtttatggttttggtagtttttgggataggatggttagttatagttggggttagtgtagttgggaaagtatatgtaatgattatggatatagtgattttgattattgtagttatttgggtaggattttgaggttgagggtggggaagagggagggattttagtatttgtggggtttgagtaggtgggtttattttagtttggtttataggaataggtgtagtggtttagattaaatatattatggagattgtagagggtttgtatatttgtttgatttggagtaggaggggagaggtaagttttagttttttttttgggagagaggttgagtttatgtagtgtttttatgtgtaggtttttagttaggttagttttattttataaggttatgtttgttttta

SEQ ID NO: 113 - DNA, 1405 bp, Artificial Sequence
  chemically treated genomic DNA (Homo sapiens)
tgtttttggtgttggggtgttatttgggagtgggggtattgtggtttttgttattatgggttttgtgtgtttttatgtttttagttgggttagtgagaattaattttttagtagtagtaattattttagttttagggagtttattgattttttattttttttttaagaggtatttgtagtttttgtagtgggtagtggggagtgttgaggaggtggttttgtatttttagtttttgttgttggtagtggaggggttatatttggaaagttgttgttggaggtagatgagttgtgtgatgatggtggggatgggaggggggtagtggtttttggggttgggttttggagatttatttatatattttttagtattatgttatagaaatattgggtatatgtgaagtgaggtggtaattgtttagtgttaatatttttggttttttaagatttagatttggaggaggaagaggaggaggaagatttggtgttgatttgtgaggatgatgaagatgaagaattagggggtagttttagggttttagtggggggagggtttgaggttatttttagtataagtgatgtttgtattttgagtgagtttttagataagggggaggagtaggttaatttttgtgagttttttaatgattttggtttatatgagggtgggggttttgtggtaggttttgatgatttaggggggttaattttttttttttatgtttttttttattttttttgattgtttttttttttggatatgtagggtaattagattttggtttttttgttgttgtttttatttttatttttataggtttttggttaattattagggaattaagtagaatatggggtagtgattgtggggggtatgttggtggggagtttgggtgtgttgggtagtgttggtggggtttttggagggattggtagtggggatgggaataagatttttttgtgttattgtgggaaggtttttttttataagagtatgtgggattggtatgtgaatatgtattttaatttgtggttgtttgattgttttgtgtgtaataaaaagtttaagatgaagtattatttgattgagtatatgaagatgtatataggttttaagttttatgagtgtggagtttgtgttaagaagtttatgtggtgagatagttttatgtgttattgaggatattgtgagtgttggtattgtttgggtggggttggggttgtatttgggtttgggatttttatggggttatttttgttgtttaagagagagttttttggagtgggtgggggtagtggtgatgaagtgagtgtggttatgtttttgtttagtagatgtgtttggtttttatttagagtttataaggtggagatgggttttggtggaggtggaggagtaaattga

SEQ ID NO: 114 - DNA, 1405 bp, Artificial Sequence
  chemically treated genomic DNA (Homo sapiens)
ttagtttgtttttttatttttattgaagtttatttttattttgtggattttgggtggggattagatatgtttgttggatgggggtgtggttgtatttgttttgttgttgttgtttttgtttattttgggagatttttttttggatggtaaggatggttttgtgggagttttaggtttaggtatggttttgattttgtttaggtggtgttggtgtttatagtgtttttggtggtgtatgaagttgttttgttatatgaattttttggtgtagattttgtatttgtagggtttgagatttgtgtgtgtttttatgtgtttagttagatggtgttttattttgaattttttgttgtatatggggtagttaaatggttgtagattgaggtgtatgtttatgtgttggttttgtatgtttttgtgggagaaggtttttttataatggtatagaaagattttatttttgtttttattgttagtttttttagggattttattaatgttatttggtatatttaggttttttattgatgtgttttttatggttattgttttgtgttttgtttggttttttggtggttggttaggagtttgtgaggatgaggatgaagatgatgatgggaagattaggatttggttgttttgtatgtttaagggaaggagtggttgaggagggtgggagggggtataggaagagggagttggtttttttgagttattaagatttgttataggatttttatttttatatgggttaaagttattggaggatttatagaagttgatttgttttttttttttgtttgggggtttatttagggtatggatattatttatgttgagggtagttttaggttttttttttattggaattttggagttattttttagttttttatttttattatttttataggttaatattagattttttttttttttttttttttttagatttgggttttggggaattaggggtgttggtgttgggtaattattattttgttttatgtatatttagtgtttttgtggtatgatgttagggggtgtgtaggtgggtttttggagtttagttttaggaattattgttttttttttatttttattattattgtatagtttatttgtttttagtagtagttttttagatgtggtttttttattgttaatgataggggttgggaatatagggttatttttttgatgttttttattgtttattgtagaagttgtaaatgttttttgggaggaagatgagaaattagtggattttttggggttgaagtagttgttgttgttgggagattgatttttattggtttggttggaggtatgggagtgtgtagagtttatggtagtaggggttatagtgtttttatttttggatggtattttagtattagggata

SEQ ID NO: 115 - DNA, 2500 bp, Artificial Sequence
  chemically treated genomic DNA (Homo sapiens)
gtgtgggttagggaggtttgatatatttttattttttttagatatattttttattgatttgggattggaggagtgagtttagttgtaataaattgttgagatgtatagtttttgtgttggtggaggggtggttttatggtgagtatggtatggtggttgagtaggtttttatgatttggataggtgtggggagagggttgaagatggattgggttggtggggtgggggtgttggggagtggtgggagttggttgggggtgggagaaggtggagataaagttttgttttttgaggggagatggtgtttttttttggaaggtggagtgggataggggttgtgggtgagaggtttttgtgggtttttgtttggttttgtttttttttttttttttagtagtgaagtttgattatttttttggtgtttgtaaaaatagtttttttagatttttagtttttagtttgtgtgtttttgtttttgttttttttagtttttggtttgggattttggaaagaatgatttagtttttgttttttttttagattttttttttatttttatgtttttgattttttttttggatttttagtttttgaggtttttttttattattttttgttttttttttttattagttgtttttattttttgtaattgtattatttttttttttttttttttgattttttttattttttgtattttttttgattattttgttttttttttttgtttttggtgaaagtttattagatttttattttattttttttttgtttgtagagttatttgtgtggtttgtttttttaattttttttttttttttatttgtttttttttttttttttttttttttgtttttttaattttttttttagttatttaaaaaaagatttttgtttttttgagaagtttgtttaaaaggtttttatgggaatagtgaggggagatgaaggtagagaatagagatttgtagttaaggtgtagagagatgtttttagtttttggaaatttttttgttattgtttttttttattttatttttttttttggatttagtgatttaggttttttatttttttaatttttaggtgattttttttttttattagttttttttttttttaggaatttaagttattagttttttttttttagagagttagtgatttgtttttattttttggttttttttagttttttgataggtttaggttttattagttttgtgggttggtttggggattttgggtgggtgggtgggtggttagggatgtgtgttattgttatggaaattttatattattggggtgtgtgggtagtatatttttgtgaggtaaagttaggtggtggtggagtgtatatagagaatgtgtgtgatgtttgttatatttgtgtgtatatgtatatgtgtgtatgttatgtttatgtttggggaagatgtgtgtgtttgtgtgtatgtgtgtatatttgtgtttttaggttagaatggttatatgtttatagagtatgtttattatgtgttttgtggttggtagatttgtttatttattttttatttttttttttattttgagtttttagggtttaggggtttttggtgggggttttttgtgtgttttgggtggggatattgtgtgtgtttggagttgaggtggtatgtggaggttgttgtattggggtttagtaggggttgggaggggttttaggggtatatgtatttggggggagggtttagtgaaagttgatgggggtgaatgtttagggtttttaggtagatatggaatgtgtaaagggtatggaggatgtgtagtggatataggggttgttgggattttggggatttggtaatgttaaggtgtttgttgaggttgtggattttttagtttgggagaggttgttggatttttgaggggtattggaattttgggttttttttttgttgggtggagttgtgaatttttgttttttttgtggttttgtgtgtgtgggggggttttgtttaggaggggatggtgggtggtttggtttgttttgggggtttttttgttttttttttttgttttttttgtgttgtttttgggtgatagggtttgtgatagaggtggttatggtagtagtggttgtttagtaatggtggtggggtttgggtaatggtggtagtggtgggagtggtggtggagggagttgtttttgtggttgttattgtgtggttgttttggttgttttgggttttgttgttgtttttattgtgttgggtggtgtgagttgggttgtattgttttttttttttttgtattttgttttttttttgtgtaggggtggggttttttttttattggggatatttttggtttttttggggggtggtgtgaggtaagggtggggttgggtggattaggagtgtgtgtagaggggggggtgttgtgtgtgtggggtgggggtgtgtgtgtgtgtgggtgtggggaggggggtggggaagttgtggtggtggtggtggtg

SEQ ID NO: 116 - DNA, 2500 bp, Artificial Sequence
  chemically treated genomic DNA (Homo sapiens)
tgttgttgttgttattgtggtttttttatttttttttttgtgtttatgtatatgtgtgtttttgttttatgtgtgtggtgtttttttttttatgtgtgtttttagtttgtttggttttgtttttattttgtattgttttttgggggggttaggggtgtttttggtgggggaggggttttgtttttgtgtgggggaagggtggggtgtggagggagagggggtggtatggtttggtttgtgttgtttggtgtggtgggggtggtggtggggtttgggatggttgggatggttgtgtggtgatggttgtgggaatggttttttttgttgttgtttttgttgttgttgttgttgtttgggttttgttgttgttgttaggtgattgttgttgttgtggttgtttttgttatgagttttgttgtttggagatagtgtgagagagatgggggaggggggtaaggggatttttaaaataaattaggttatttattatttttttttgagtaggatttttttatatatataaaattgtggagagaatgagggtttgtggttttatttagtagaggaggagtttaggattttaatgttttttaaaggtttggtgattttttttgggttggagagtttatagttttagtaaatattttggtattgttaagtttttaaggttttaatgatttttatgtttattgtatattttttatgttttttatatattttatgtttgtttgaagattttaaatgtttatttttattaatttttattaagttttttttttaaatatatatgtttttggaattttttttagtttttattgaattttaatatagtaatttttatatgttattttaattttaaatatatatggtgtttttatttaaaatatatgggagatttttgttagagatttttagattttgaggatttaggataaggagaaagatggggaataagtgggtagatttgttaattataggatatatgataaatatgttttgtgagtatgtgattattttggtttggaaatgtaggtgtatatatatgtatataaatatatatattttttttagatatgaatatgatatatatatatatatatatatatatagatgtgatagatattatatatattttttgtatatattttattattatttgattttgttttatagagatgtgttatttatatattttgatggtatggggtttttatgataatgatatatatttttgattatttatttatttatttaaggtttttaaattggtttataaggttagtagggtttggatttattagaaggttggaaggagttaaaggatggggataggttattggttttttaagggagagaaattggtagtttgaatttttgaagggagggggagttggtgggaaaaaggggttatttgggggttggaggaatggggaatttggattgttaggtttgggaagggaaatgaagtggaagggggtagtgatgagggggtttttgggggttgagggtgtttttttgtattttggttgtagatttttgttttttgtttttatttttttttattgtttttatggaaattttttaagtgaattttttaggaagataaaaatttttttttaaatgattaaagagggggttgggggggtagaaagggggagggaggggaagagatagatggagagagggagagagttggagagatagattgtgtagatagttttatagatagaaaggagatgagatgggagtttgatggatttttgttgggagtagaggggagggatggggtaattaagaggggtatagaaaataagagaaattagggaggaaagagaaagggtgatataattgtagaaaatagaagtagttgatgagaggagaaaatagggggtaataaaaggagattttaaggattgaaggtttggaagaagaattaggagtataggggtggggaagaggtttggggggagggtaggaattaggttattttttttaagattttagattaggggttgggaggggtaggggtaggaatatatggattggaagttaaagatttaaggagattatttttataagtattaggaaaatagttaaattttattgttggagaggagaaagggagtgaagttgagtgaggatttataggggttttttatttatagtttttgttttgttttattttttagaggagggtgttatttttttttgggaagtaagattttgtttttgtttttttttgtttttggttagtttttgttgttttttgatgtttttgttttgttagtttggtttatttttagttttttttttgtgtttgtttgggttatgagagtttgtttggttgttgtattatgtttgttgtggggttgtttttttattggtatggagattgtgtgttttagtagtttgttgtgattggatttgtttttttggttttggattagtagggggtgtatttaggggaggtgggggtgtgttagatttttttggtttatgt

SEQ ID NO: 117 - DNA, 2500 bp, Artificial Sequence
  chemically treated genomic DNA (Homo sapiens)
gttaattgttttttgggaggttaaatttttttttttttttttagtttagaagttgtttagatgaaaagtataattttaatattgttttagttttatagttttaagggatttttgggtttttattttagagtttaggatgatatttttgtggaaaatattgtttgtttggggattgttttttgttgtggttgtaggtttgtttaggaagaggagttgaaaagaggtaagttagggaaatagaaatagtggagtatattgtagtgggaattgtattgtgtatttttttgagtttttttttttataagttatttatgggaggtagttagtgaatatttagtaattaaggaaatatgagaaataggaaagtttagggtttattatgtaatttaggtttagtgatgtatgaggttagtgtttttatttgtaatagaagtaaaatgattaaaagataatgatttgattttttgttgtttattttttagtgatttggttagggaagaagaagaaaaaagtgagtagtatagttatttttgtttttaaggttgagagttgaggtttattgagatttgttggtgtgaataattttttatgatttttaaaaatgtggtgatttatttgttggtgatttttgtgttgttggtgattttttatgtgttagggaggttgttttgtgtgttttagaaagtgtttttattttaaattttttatgtttgtgaaatatttgtttttttgtttggttgttaatagaatgaaattatattgattaattattagaatggattttttttttttatagtgaatgtgatattggttttaaatatagtttatttgagattgattttttttgaatagaataagtgtgtgatttatggatatttaggtagttagatattttatagagatttgattatttgttttatgggttagagggaatttttgttagggagttggtattgagaggtggagattgggaatagggtgtgatgggttttggaggttgttaagtatatgttgtaaagaaagagttatttttgtgttatttgatagtgagttttaggtaatggattgtaaaagaaatgagttttgggttatttttttttttttaagttttatttttttgaaggtggtttttgaataagttagaatttttttgattgtgtttttgaatatttttttttttataatatgattggtaagtgttttatttatattttttttaaaatttttttttttgggattttgtattttgttttattttttggttttttaatgtaggttttttggatattttttttgtatttataagaatatttttaatgtattaggaaaataataatttgggattttggaaattagaatgatattttgagttttgattattttttatttttttaattgtttgaagggggttgttatgattattgaagtattaatttaaggtgttttaattttatttaggaaaatttgttggagattgatttttttagagatttattttgttttaggttttttgagatttggtttattaattataatttgatatttgataattaaggatttttagaaaattttatgggaaatataatttagtttataggaagaaatgaaaggaataattaaggatttggttagttttttttttttttttttttttttttttttttttttttttttttgagataaagttttattttgttatttaggttggagtgtagtggtatgattttagttgattgtaatttttgttttttgggtttaagtaatttttttgttttagttttatgagtagttgggattataggtatgtgttattatgtttagtttatttttgtatttttagtagagatggggttttattttgttggttaggttggttttaaatttttggttttaaatgatttatttgttttggttttttaaagtgttggaattataggtatgagttattatatttggtttgattagtttatttaagatggtgataattaattgtttatataggtggaattgagaaaataaaaaatatatatatatagttaaaaaaaagtgaaagaaaatatagttgtataagggggagaaaaatttgattattaaaatataattttgaaaattttatgaagtgttgtaaaattttttttttagattttttgagaaagttgatataggaaattgagttaggaaaaaaattttagattttttgatttaagtgaaaaattatgtattatttatatgaatatgttaattttattgttagagtaaaataaagtgtataatttaaaattaataattataaaataaataaatataagtagtatatgtaatatagtaaaaatattttaaagttataatgagtttaagaagataaattatatgtggaagatagaagaatgttaataagatttttggaaagaatgttatgaagtgagaagatgaggatttgttagtgatgttttgttgttttttaggatggtagatgttagaggtattgtggttttatgtg

SEQ ID NO: 118 - DNA, 2500 bp, Artificial Sequence
  chemically treated genomic DNA (Homo sapiens)
tgtatgggattgtgatgtttttgatgtttgttattttggagagtagtagagtgttattagtaggtttttgtttttttattttataatattttttttaaaagttttgttgatatttttttgttttttatatatagtttatttttttgaatttattataattttaaaatatttttattgtgttatatgtattgtttatatttgtttattttataattattaattttaaattgtgtattttattttgttttaataataaaattgatatgtttgtatagatgatatataattttttgtttggattggaaagtttaaaattttttttttgatttaattttttgtattaatttttttaaaaagtttggaggagggattttataatattttataagatttttaagattatattttagtgattagattttttttttttttatgtagttgtatttttttttatttttttttaattgtatatatatattttttatttttttagttttatttatgtggataattaattgttattattttaaataaattgattaggttaggtgtggtggtttatgtttgtaattttagtattttgggaggttgaggtgagtggattatttgaggttagaagtttgagattagtttggttaataaagtgaaattttatttttattaaaaatataaaaataggttgggtatggtggtatatgtttgtaattttagttatttatgagattgaggtaagagaattgtttgaatttgggaggtagaggttgtagttagttgagattatgttattgtattttagtttgggtgatagagtgagattttgttttagaaaaaaaaaaaaaaaaagaaaagaaaaaaaaaaaaaaagaaattgattaaatttttgattattttttttatttttttttgtaggttaaattgtattttttatgggattttttaagggtttttgattattagatgttagattgtgattgataggttggattttagagaatttggaataggataggtttttgaaaagattagtttttagtagatttttttgagtagaattaaaatattttgagttagtattttaatgattatggtagttttttttaagtagttagagaaatgagaaatgattaggatttagaatattattttggtttttagaattttagattgttatttttttgatatgttggagatgtttttgtgggtatagaaaaaatgtttagagaatttatattagggaattaaagaatgaagtggggtgtagagttttagagaaggaagttttggggaaggtgtagatagggtatttgttaattatgttataagaggagaggtatttagaggtatggttagggggattttgatttgtttaggggttatttttaaggggatggggtttggaagagaggggatggtttagaatttattttttttgtaatttattgtttaaaatttattgttaggtgatatagagatgattttttttttgtaatatgtgtttggtaatttttgggatttattgtgttttgtttttagtttttattttttagtattagttttttgataggagttttttttggtttatagagtagatagttagatttttgtgggatatttggttgtttgaatgtttatggattatatgtttgttttgtttagaagaaattagttttaggtgagttgtgtttgaagttaatgttatatttattgtaaagaaagagaatttattttgataattaattaatataattttattttattaatagttaaataggaagataagtgttttatggatataagaaatttaaagtggaagtattttttagagtatataaaatagtttttttaatatatgagaagttattagtaatatagaaattattaataagtaggttattatatttttaaagattataggaaattgtttatgttaataaattttagtgaattttagtttttagttttgaaaataaggatggttgtattatttattttttttttttttttttttaattagattattggggaatgggtagtaggaaattaaattattattttttaattattttgtttttattataagtggaaatattgattttatgtattattgagtttggattgtatgataagttttgggtttttttgttttttatgtttttttagttattggatatttattgattgttttttataggtgatttgtgaaaagggaggtttggggaagtatgtagtatggtttttattgtagtgtgttttgttgtttttgtttttttgatttatttttttttagtttttttttttgggtaggtttatagttatagtaagaagtaatttttaaataagtagtgttttttataaaaatgttattttggattttaaaatggaaatttaagaattttttgaaattgtgaaattgggataatattaagattgtattttttatttgagtagtttttaggttggagagaagggagagaatttggttttttaggaagtagttggt

SEQ ID NO: 119 - DNA, 2500 bp, Artificial Sequence
  chemically treated genomic DNA (Homo sapiens)
ttggttaaggtgtatgtggtggtggaaagggattttttagggtgtttgttgtttatttaggggttgtttagagggtagaggggtagaggtttaggtaggttagtgttgtggttaagaatttgggttttggatttagattatttgggtttgaattttaggtatattatgtatttatagtattattttggattaattatttaatttttttgaattttaggttttttattttaaaatggggatgtataagatatgaatatgtaggttttagaaaagaaatttaggaagttagtaagtatttgaaaagttattagtaattagaaatatataaattgaagtatttataagatatgattttatagttattagattggtaaaatttaggaaattagtttatgttgagtgttgttagagatataggaggttgtagggttttgggaattttttatgggatgtttagttagtttggaatgtatgttggtattatttagataaaataattatattggttgggtatggtggtttatatttgtaattttagtattttgggaggttgaggtgggtggattataaggttaagagattgagattattttggttaatatggtgaaattttgtttttattaaaaatataaaaattagttgggtatggtggtaggtgtttgtagttttagttatttgggaggttgaggtaggagaattgtttgaatttaggaggtagagattgtagtgagttaagatagtattgttgtattttagtttgggtaatagagggagattttattttaaaataaaaataaataaagaaataaataaaaattatattatattttgagtttatattttatttttgggtatatattataaagaaatttttattttggtttgtgagagaatatgtatatttattttttgtttgtggtggtatggtgttggtagtattagggtgttttttattgggagagagggaaggttagtgtgggggatgtatttatagagtgttttgtagtagttggaagtagtgggttagatgtggttataggaatatggataaatgttgaaatattaggtggagaaaaagaagtaaaaaaaaattagatatataattattttttatatgaattataaattataagtttataaaagaagatatgttttataagattatatttatataaaaagatatttgttggatatattggaatgattgtagttagggatgggaatgggatatgaaggtaaaagttaagaaatagaaataagtagttatataagtaaaatgaggaaaataataatatttgttttatagatttgtttggagagtttagtgagattttataagtaataattgggatggtgttttatgtttataaagtaaggtgggtttggttagggttgggggtgtgtgtatgtagagtttttgttgattttttttgtttttttttgttttaggttttgtttgttatagagatttttgttatgggagtaaatatgtttgtttgtatagtagtgtttgattttatgtgtaaatatgatggttttattttttgggatttgttttttggggagtatgtgtagatggtaggttgggtagggtggaggggtttggattttataggtattgttattttgttttgtaagggttgagtgtttgagatggtagatttgtattgtatgatgatggtgagtgggttagtatgtttggtagggttttagttttaggattttgttggattttgtttttgattttttttttttttttttttttttttttttttttttggagatagggttttgttttgttatttaggttggagtgtagtggtataattttgggttattgtaatttttgttttttaggtttaagggatttttttattttagttttttaagtaggtgggattttaggtatatgttatataggtttggttaattttttttttttttttatgttttgtagagatgaggttttgttatgttgtataggttggttttgaatttttgggtttaagtagtttgtttgttttagttttttaaagtattgggattataggtgtgggttatagtgtttaattttttttgatttttttgttttgtttgggagaagttgaggtaggagtgagtgaatttaaggatgagattggagtttattttttttagtttttttttatgtgaatatggagttagatggggtttttgagtttatttattttagtttgtttttttatgttatagaagaggtgagtaagtggtttgtttaaggttttatggttgtagagttaggattggatttgatgggagtaggtttagtttagaagattggttggggtttagtaggttttattttgattttagtgatttttgtgatttgattttaggggaagttgttttagttgtagttttagttttgttttatgtatattatgatttttaatttgttgtgagtggatgtttttagggtggaggatatgatgaagaggagtttttttgagttttttttttg

SEQ ID NO: 120 - DNA, 2500 bp, Artificial Sequence
  chemically treated genomic DNA (Homo sapiens)
tgggagggaaatttagagaagtttttttttattatgttttttattttgagggtatttatttgtagtaagttgaggattatagtgtatgtgaggtggaattgggattgtagttgggatggttttttttggagttaggttatagaagttattgagattagggtgggatttattgaattttagttagttttttggattgggtttatttttgttagatttggttttagttttgtaattatggagttttggataaattatttgtttattttttttgtaatataagggagtaaattgaaataaatggatttaaaggttttatttagttttatatttatatgggagaaaattggaagagatgggttttaattttatttttggatttatttatttttattttagttttttttaggtaaaataaaaaagttggaggaagttgggtgttgtggtttatatttataattttagtattttgggaagttgaggtagatagattgtttgagtttagaagtttaagattaatttgtgtaatatagtaaaattttatttttataaagtataaaaaaaaaaaaaaaattagttaggtttgtgtggtatgtgtttggaattttatttatttgggaggttgaggtgggaggattttttgagtttggaaggtagaggttgtggtgatttgagattgtgttattgtattttagtttaggtaatagagtaagattttgtttttaaaaaaaaaaggaagaagaaaaagaagagaggagaattgaagatagaatttagtaaggttttggagttggggttttgttgagtatgttggtttgtttattattattatgtggtgtaggtttgttattttgggtatttggtttttgtagagtaggataatggtgtttgtggggtttaggtttttttgttttgtttggtttgttatttgtatatattttttagggagtaggttttggaaggtggagttattgtgtttgtgtatggagttaaatattattgtatgagtaggtatgtttatttttatggtaaaggtttttgtggtaaataagatttgggatagaggagaatagaaaggattagtaaaggttttatatatatatatttttagttttggttaagtttattttattttgtaggtataaggtattattttagttgttatttatgggattttattgaattttttaggtaaatttatagggtaggtattattgttttttttattttatttatgtagttatttatttttattttttaatttttatttttatattttatttttatttttgattgtaattattttaatgtatttaataaatatttttttatataaatatgattttatagaatatgtttttttttgtgagtttgtagtttataatttatataaaaagtggttatatatttgatttttttttgtttttttttttttatttagtgttttaatatttgtttatgtttttgtggttatatttaatttattgtttttaattgttgtagaatattttatgggtgtattttttatattaatttttttttttttttagtgaagggtattttggtattattaatattatgttattataaataaaggatgggtgtatatgtttttttatagattagggtgagaatttttttgtgatatatatttaggaatgaaatataagtttagagtatgatatagtttttgtttgtttttttgtttgtttttgttttgagatggagtttttttttgttgtttaggttggagtgtagtggtgttattttggtttattgtaatttttgttttttgggtttaagtaatttttttgttttagttttttaagtagttgggattataggtatttgttattatgtttagttaatttttgtatttttagtagagatagggttttattatgttggttaggatggttttgattttttgattttgtgatttatttattttagttttttaaagtgttgggattataggtgtgagttattatgtttggttaatatagttattttgtttaaatagtgttagtgtgtattttaaattggttaggtattttgtaaaggatttttagaattttataattttttatatttttggtaatatttggtatgaattagttttttaaattttattagtttaatagttgtaaagttgtattttgtgagtattttaatttgtatatttttgattattaataattttttgaatgtttgttagttttttgggttttttttttgagatttatgtatttatattttatgtatttttattttaagatgggaaatttaaagtttaggaaggttaaataattggtttaggatgatattgtgaatatatggtgtatttgggatttaaatttaggtagtttgaatttagagtttagatttttaattatagtattggtttgtttaaatttttgtttttttgttttttggatagtttttaagtgggtaataagtattttgaggagtttttttttattattatatgtattttgattag

SEQ ID NO: 121 - DNA, 2500 bp, Artificial Sequence
  chemically treated genomic DNA (Homo sapiens)
atttaatatttaataatttttttttaaaattttaatattttgtgtaggttttaaaatgtgtgtgatagattgggtatggtggttagtgtttgtaattttaatattttgggaggttgaggtaggtggattatttgaggttaggagtttgagattagtttgattaatatgatgaaattttgtttatattaaaaatataaaattagttatgtgtgatggtgtatgtttgtaatttagttatttgggaggatgaggtaggagaattgtttggatttgggaggtggaggttgtagtgggttgagattatgttattgtattttagtttgggtaattagagtaaaattttgttttaaaaaaataaataaaataaaataaaataaaataaaatatgtgtgatagaagtttggaagttattggtttaagttttttgttagaattttgttttgtaattgtgttttttataatattttatgtaatattatagatggtttttttttttagttatattttaaagagggtagtttttgtgtttttttgggatttaaaattaagtaatttattgtattgtgaggtggtaatatatattagttggagtagtgattgagaattatgtgatatatttagattttatttttattttttttttatggtgtgatgggggaagggggataaggtaatatattttaatttttttatttataaaataggggttattatgttttttatagggtggagtgaagagagtttgttaaagagaaagatgtttaataaaggttttttttttagttgttgttgttttttatttttattattattattattattatttttgagatagagtttttgttatttaggttggagtatagtggtgtgattttagtttattgtaaattttgttttttgggtttaagtgatttttttgttttagttttttgagtagttgggattataggtgtttgttattatattaggttaatttttgtatttttagtagagatgggttttgttatgttggttaggttggttttgaatttttgattttaggtgatttatttgtttaaagtgttgggatttaggtatgagttattgtgtttagtttttagtttttttttaatagttattttttagtgttttttttggtttttgtttttgttggttttattttagtttttttgttttttttagggttttttgtttgtttttttattattttttttttggttttagggttttttatgttgttttttatttgttttgtatagatttttagttttgagattaatgtgagtgttgttattattatttttgttttagagtttaaagtttttatgtttgttttgaatgataatttttgggatatgattgaggtgattagtagtttggaaaatgttaattataaaggtatgggtgttattatgtgatggtgatgagagaggagaagatggatttttttagggtttgtaaataaattttggatgagttaaaaagagagtgaggttttttggtggtatttgagttttatgagtttggggtagttttaatgtttagggttatggtgggggagtttagttgtttttagtttatagtttattttgagatgttgtaggtttaaagatattgtgtaggtttttaattttttttagttgttaaaattatattgtttggtttgtatggttgtatattgttatttttttatgttattagttatttatatattatgtaaagtgtttggttggtatttagtaaatggttgaagttatttaaggttttggaaattttatttttgaattttgggattttagtgtggttttggattggggttatgtaatgaatatttttttttttttttttttttttttttttttgagatggagttttgtattgttatttaggtttgagtgtagtggtatgattttggtttattgtaatttttgtttttagggtttaggtaatttttttgttttagttttttgagtagttgagattttgggtatttgttattatgtttggttaattttttatatttttagttgagatggggttttattatgttggttaggttggttttgtgattttgattttgtgatttgtttattttagttttttaaagtgttgggattataggtgtgaattattttgtttggttttatgtaatgaatatttttaaggtggaaaggtttttaaagtttgaataagtaatgatgttatatttttatttgaatggtaaatgtttgagtttattaaaataattgataaattgtatttttaggttgggtgtagtggtttatgtttgtaattttagtattttgggaggttgagatgggtggattatttgaggttaggaaattagtttggttaatatggtgaaattttatttttattaaaaatataaaaaattagttgggtatggtggttggtatttgtaattttagttatttgggagattgaggtatgagaattatttgaattggggaggtggaggttgtagttagttaagattatg

SEQ ID NO: 122 - DNA, 2500 bp, Artificial Sequence
  chemically treated genomic DNA (Homo sapiens)
tgtgattttggttgattgtaatttttatttttttagtttaagtgatttttatgttttagttttttaagtagttgggattataggtgttagttattatgtttagttaattttttgtatttttagtagagatggggttttattatgttggttaagttggttttttgattttaagtgatttgtttattttagttttttaaagtgttgggattataggtatgagttattgtatttggtttggaaatgtaatttattgattgttttgataaatttagatatttgttatttagatagagatgtggtattattgtttgtttaaattttaaaagtttttttattttagaaatgtttattgtatagggttgggtaaggtggtttatgtttgtaattttagtattttgggaggttgaggtgggtggattataaagttaggattatgagattagtttgattaatatagtgaaattttattttaattaaaaatataaaaaattagttaggtatggtggtaggtgtttgaaattttagttatttgggaagttgaggtaggagaattgtttgaattttggaggtagaggttgtagtgagttaagattgtgttattgtatttaagtttgggtgatagtgtgagattttattttaaaaaaaaaaaaaagaagaagaaaaaagaaatgtttattgtataattttaatttaagattatattaaagttttaagatttaaagatgaggtttttaaaattttgagtggttttagttatttgttaagtgttaattaggtattttatatggtgtatgggtggttaatgatatggggagatggtagtgtgtagttatgtaaattagatagtgtggttttggtaattggaaggaattgaagatttgtatagtgtttttggatttgtagtattttagaatgagttatgagttgggggtagttggatttttttattataattttggatgttgaaattattttagatttgtgggatttaggtgttattaagaggttttattttttttttaatttatttagaatttgtttgtaggttttgagagggtttattttttttttttttattattattatgtgatgatatttgtatttttatagttggtattttttaggttgttgattattttagttatattttgggagttgttgtttaggatagatatgaggattttgggttttgaggtaaaggtgataatggtaatgtttatattgattttaaagttgaagatttgtgtggggtaagtgagaggtagtgtaaagggttttgaagttaaaggggagatggtaagagagtaaataaagggttttggaggaggtagagaaattggagtgagattgatagaggtaaggattaggggagatattaggaaatggttgttaggaagaagttaggggttgggtgtggtggtttatgtttgaattttaatattttaggtaggtggattatttgaggttaggagtttgagattagtttgattaatatggtaaaatttatttttattaaaaatataaaaattagtttggtatggtggtaagtatttataattttagttatttaggaggttgaggtagaagaattatttgaatttaggaggtaaagtttgtagtgagttgagattgtattattgtattttagtttgggtgatagagattttattttaaaaataataataataataataataaaaataaggaatagtagtagttaaggaagaaatttttgttgaatatttttttttttgatagattttttttattttattttgtgaggggtatgatgatttttattttatggataaggaaattgaggtatgttgttttgtttttttttttttattatattatgaggaggaggtggaagtgggatttgaatgtgttatatgatttttaattattgttttaattggtgtgtgttgttgttttgtagtgtaatgagttatttaattttgagttttaagagagtatagaaattgttttttttaaaatgtagttgggagggaaaattatttataatgttatatgaagtattgtgaaaagtataattataaaataaagttttggtgaggaatttaaattagtggtttttaaatttttattatatatattttattttattttattttattttatttatttttttgagatagagttttgttttagttgtttaggttggagtgtaatggtgtgattttagtttattgtaatttttattttttggatttaagtgatttttttgttttatttttttaagtagttgggttataggtgtgtgttattatatgtggttaattttgtatttttagtatagatagggttttattatgttggttaggttggttttaaatttttgattttaagtgatttatttgttttggttttttaaagtgttgggattataggtattagttattatgtttagtttattatatatattttaaagtttgtataaaatgttgaagttttaaaaggaaattattaaatattaaat

SEQ ID NO: 123 - DNA, 2500 bp, Artificial Sequence
  chemically treated genomic DNA (Homo sapiens)
ttggtgggatttaatgggtttgggaagagtatagtggttgttttgttgtagaatttgtattagtttattgggggatagttgttgttggatgggaagttttttttttaatatgagtattgttatttgtataggtaggtatggaagtaggtggtttgaaggagggtagggagtattaaatatgaagagtatttttattgagtattttgaaagaggggttagggaatgataagagattttgggtggagatggtggtgtagttaggagggaggtagtatgattttgtgatatgtttttaataaagattttgagtttttgatttttagataattatatttttatgtgttttgttttatgattttttattatattttattttaggtggttgtagtgggataagagttataggtatttggaagaagtttttaagaaaatattgtttatggtttgatttagaagttaattatggaggaaattatagttgttgtagtaaagtttggggtttatagttttatttttggatttttttagggttatgatataggtattttttttatttattttattatttagttatttttatttttgttgaaattttagtagttttgtttttattttttagtttttttttatttatggatattaatttgaagttgtaagattatgtttttatggtttttttattttgatatttttaggattttgtttatttttttagaattttttttatttagttataattgttagattttggtgtgtgtgagtgtgtgaatgtatgagtgtgtttgtgtgtatgtatatgtgtgtatatatgtggttatattgtttttattttggttttttgttttgtagaggtagatgaggttgggagttagttgttagggggttagtgataggtagtggtgttggtttgagtattgatttggaaattgtgtgtatttattttggatgatgttattagtgttttggatgtaaatagttagttataggtgaggtagttatttttttaatggttatattttatttaattttgttttttttatatattttttgttagttttattaatattataattatataaattagtttttgtagtttttagtttttaaatttagttttattggatgtttttttaaggagtagagatagaagatgaggtaaagatatttagaattagttaaaagagattatttataaattatagattgaatttttttttttttttttttttttttttttaagatagtgttttatttagttgtttaggttggagtgtagtggtataattttggtttattgtagttttaatttgttgggtttaagtgattttttttttagttttttgagtagttgggattataggtgtatattattatgtttggttgatttttatatttttagtagagatgggttttattatgttgtttaggttggttttgaatttttgagtttaggtaatttgttttttttagttttttaaagggttggggttataggtgtgagttattgtgtttagttttatagattgaatttttaaagtgaaatataaggaaaagattatttttataatattgtttatttaaaaaaattattttttgtatagatagtgttttgttatgttgtttaggttggttttgaatttttgggtttaagtgattttttttttttgattttttaaagtgttaggattataggtatgagttattgggtttagtttattttaattatattaatattaattaagttagtttgtttatatgtattgttatttatttatttattaggaatttttttgagttaggtatttattattattttatagatgataaaatggaggttaaaagaggttgaataagttgtttatatagaggttatatagtttttgagtggtgtagttttgatttaaatttaggtttgtttgatttgaatgtttatttttttattattaagttatatttttttaaaattgaatataaaaatgttaagtttatgggtagagaagaggattatttaatagtttttatttttttgttatgtgttttattttagggtttttatttttattttatttttgtattttttatgtaaaatagtttttaatgaaataaagggtttgtggagaagtatttagaatgggaaatgttggtgtttttggggttgttagtagagttagtagtgattttgtgaggttagttttagttttggaaatataggtgtttttttgggttgagggtagtttttggttttgatggtttgatgtttttttttaggtggagtagtttttgtatgaaagttttgagtggtatttttgtttagtgttttttattatttagtattttagtttggtggagtaggttgattatattttttttttggaaggaggtgttatttgggaggggggaatttattagtagtttatggagaaaaaggggtgttattgggttatggtgtaggtttttgtagatgttttagaatgaaagtttttttagatttgtgtatttt

SEQ ID NO: 124 - DNA, 2500 bp, Artificial Sequence
  chemically treated genomic DNA (Homo sapiens)
ggagtgtgtaggtttgagaaggtttttattttggagtatttgtaggagtttgtattatggtttagtagtatttttttttttttatgagttgttggtgggttttttttttttggatagtgtttttttttagaaagaggatgtggttagtttgttttattaggttgaggtgttgggtgatgagaagtattgagtgggagtattgtttagggtttttgtataggagttgttttatttgaggaaagatattggattgttagagttggggattatttttagtttagggagatatttgtgtttttagggttgggattgattttataggattattgttggttttgttaataattttaaggatattaatgttttttattttgagtatttttttgtaaattttttgttttattaaggattgttttatatgaagggtgtaaaagtaggataaaaatgagaattttagggtgaaatatgtgatagaagaataaagattattgaatagtttttttttttatttatggatttggtatttttatatttgattttaaggaaatataatttagtagtaaagagatgagtatttaagttaggtagatttgaatttgggttaaggttgtgttatttaaaagttatatgatttttatatgagtagtttatttaattttttttaatttttattttgttatttgtagaatgatgataaatgtttagtttagaaggatttttaatgaataaatgagtgatagtgtatgtaaatagattagtttaattaatattaatatgattaggatgggttgggtttggtggtttatgtttataattttagtattttgggaggttaaggagggaggattatttgggtttaggagtttaaggttagtttgggtaatatagtgggatgttgtttgtataaaaaataatttttttaaataaatgatattatgaggatggttttttttttatgttttgttttagaaatttagtttataggattgggtgtagtggtttatatttataattttagttttttgggaggttgaggggggtagattatttgagtttaggaatttaaggttagtttgggtaatatggtgaaatttatttttattaaaaatataaaagttaattaggtatagtggtgtatatttgtagttttagttatttgggaggttgaggggagaattgtttgagtttagtaggttgaagttgtagtgagttaagattgtgttattgtgttttagtttgggtaattgagtgagatattgttttaaaaaaaaaaaaggaaagaaagaaagaaatttagtttgtagtttgtagatagttttttttaattgattttaggtgtttttgttttgttttttatttttattttttggggaggtatttaatggaattggatttgggaattgagaattgtaaggattggtttgtataattatgatgttagtaaaattaatagaagatgtataaaagaagtaagattgggtgggatatagttattaagaagatgattgttttatttgtaattggttgtttgtatttagggtattggtggtattatttaggataagtatatatggtttttggattaatgtttgggttaatgttattgtttgttgttgattttttgatagttggtttttagttttgtttatttttgtagagtaaagggttaagatgagaatggtatagttatatgtgtgtatgtatgtatatgtatatagatatatttatgtatttatgtatttatatatattaagatttgatggttgtagttggataggggagattttgggaagatgaatagaattttgaggatgttaggatgaagaagttataggagtatgattttataattttaaattgatgtttatgagtaaggaggaattgaaggataaaggtaagattattggggttttagtaaaggtaaagatggttgggtggtgagatgagtggagagagtatttgtgttatagttttgagggagtttagagatgaaattatgggttttagattttattgtagtagttgtgattttttttatagttggtttttgggttaggttataggtaatatttttttgaagattttttttaaatatttgtggtttttgttttattgtagttatttgagatgaaatatgatgaagagttatagaataaggtatatgggagtatggttatttagagattgaagatttaaaatttttattgagaatatgttataaaattatattattttttttttgattatattattatttttatttaaggttttttattattttttaattttttttttagagtgtttagtaagaatgttttttgtatttgatgttttttgtttttttttaagttatttgtttttatatttgtttgtgtaggtagtggtgtttatattggggaaggggttttttatttaatagtagttgttttttggtgggttggtatagattttgtagtagggtagttattgtgttttttttagatttattgggttttattag

SEQ ID NO: 125 - DNA, 2500 bp, Artificial Sequence
  chemically treated genomic DNA (Homo sapiens)
taatgatttttaatttatttttttttttagttagttttttttggggtgggtgggtattagggatttagtttttttggatttttggtgttttttattattggggttttattgatttttttagttatgtttttttgttgattgttagttttagttatgggtttaaggttttttattttattttttttagggggtttttgtttaggttttttgtttttttttttttgttgttagtttttttgttgttgttgttttttttgttgttttttggggggtaggtgaggttggagttgaggggtagagggaggtgggggtatgtattggggttaggggtgggaatttgggttaatagttttttttttggttttttttttaattttttttttggttatttttttttttttagaatattatttgggttgtttgaggaggaagagtgttttaggggggaagtagtatagtatggagggtgtttttgttgtgtttttttggtttttggtgagtggtgtttattagatgtggtttagttgggtttttttttttttagttttaattggggttttaggagtttgagaaagagggtaggagggggagagagggagtgagagtgagaaaaagagtgtgtgtttgtgtgtgtttttttatttttttggtttttttttttttggttttgtttttttgtttttgagattagtttttttattttttttaagttgtgtgtgtgtgtatatgtgtgtgtgtgtgtgtttgtattgtatttgtgggagtaaggaagataaattggtattagggtttttatttttttttttttgtttttggagattttttttttttttattttatttttatttaggggttttttattagttgagggatgagtaggtagaattgattttgttttaatttattttatttttattttttttttagtaaggttttttgagttgatggttaaaaagttttattaaatgaatgaagttataatttaaatttgattggattagtagtttttgttagattttgttttgtttttgaagtgttgattatgattggtataggggttggagtatgtgggatgagattgatgtaatgtagggttttttgtgtgagatgtagagggagggggttatttgtgtgtaaaggttgaaggatttaatttaagttggttgggggatgttatggtataggggatagaatagaaaagaattagaatagggatttgtgagtagtaggagaggggtagggtggtagagagaagatagatagataggttggaaagggaatgaaggtgaagttaaggagggattttttagggattttttaggttaagaaggatgggttttagtttaggattaaaggagttgtataggaggagagtgattttggaggaatgtttaaggaatgtagggaaggggttggtaggtgagtgagtaataggttgtaggtggaagggtgttagggaaggttaggaaatataggggtagtaggttggagtggggttgggggtggttgaatgaatggatgatggttagggtttaaggattttattagtgagggaagagatagtatagagtatggtagagaaggggaggttgggataggtgtgtagggtgatagaatgggaagtaatttatggattgaggtatgaagaagtagttagtggagaagtttagaaggtattgtttttgagattaggttgaaggagatttttattgtttgtttttgttgtttgttatttggggtttttttttgggttttttttttatttagttattttttagggagaattatgtttttttttttttttatgtttggttatttttaggattgggtaggtagggaggttgggataaagtgagttatatttttttttgttttttttttatgttgttagagttggatttggggttggtagggggtgagggtatggtatttttggttgtgggggtgggggggggggtttgggggttgggggagtgttgtgttgatggtagttagagtttgtgatgatggggttgttataaataattttttggaggtttttatatttaagttttttttttgtttttttattgttttttattttttattttttgtttatttttatattgtttttgtattgttattttattttttattattttatgtttttagttttttttattttttgtttttttgtagtgatttttttgtattttatttttttttagtttttattttggtttttttggttatttttttagttggttttttttttttttttttgttttttgttttgttgtatatatttttgttttttttttttttttttttgttttattttttttttttttttagtttgtgtattttgttttttattttttttgagtttttttttgtttatagtttttttttattttttatgttttttttttatttttttttttgtttttgttaaaatttgtttttttatgttgtgtttatttattttttgaattattaaatgtttattaggtattagttg

SEQ ID NO: 126 - DNA, 2500 bp, Artificial Sequence
  chemically treated genomic DNA (Homo sapiens)
tggttagtgtttgataaatatttaatgatttaaagaatgaatgaatatagtataagaggataagttttagtagaagtaggggaaagagtgagggaaaagtataagaaataggagaaagttgtgggtagaaaagagtttaaagaggataaaagatagaatatatggattagggaagaagaggaggtagggtaagaagaagaaagggggagataaaggtatgtgtagtaagatagaggataggagaagaggaggaaggttaattggagagatggttgggagaattgaggtgagggttaagaggggatggaatgtaaaaaaattattgtaggagggtagaagataaagggggttaggggtatggaataatgaggggtaggatagtaatataaaagtggtatggagatgggtaggggatgaagagtagagagtagtgggaaagtgggaggggagtttgggtgtgggagtttttaagaagttatttatagtagttttgttattgtaggttttggttgttgttagtgtgatgtttttttggtttttggatttttttttttgtttttgtggttaggaatattatgtttttattttttgttggttttaaatttagttttggtaatatgggaggggggtagggaaaggtgtgatttattttattttaatttttttatttgtttaattttgggggtggttagatatgggggaaagggagggtatggttttttttggggagtgattgggtgagggggaaatttagagaggaattttaaatggtaggtaataaaggtaaatagtggaggttttttttagtttggttttagggatagtgttttttggatttttttgttggttgtttttttatgttttagtttatgggttgttttttattttgttattttgtatatttgttttagtttttttttttttgttatgttttatattgtttttttttttattgatgaggtttttgagttttagttattatttatttatttagttatttttagttttattttaatttgttgtttttgtattttttgattttttttgatatttttttatttatagtttattgtttatttatttattaattttttttttgtattttttaaatatttttttagggttattttttttttgtatagtttttttgattttgggttagagtttattttttttggtttgaggagtttttgaggagtttttttttggttttatttttattttttttttagtttgtttgtttgttttttttttgttattttattttttttttgttgtttatagatttttattttagtttttttttgttttgttttttgtgttatgatattttttaattaatttgagttgaattttttaatttttgtatatagataattttttttttttgtattttatataggagattttatattatattaattttattttatatgttttagtttttgtattggttatggttagtattttggaagtgaggtaggatttggtgaaagttgttggtttggttaagtttgggttgtgattttgtttgtttgatggagttttttagttgttggtttaggaagttttgttgggggggaaatggggatggggtgggttggggtagggttagttttatttatttattttttagttggtagagagtttttggatgaaagtgggatggggaaaagggaagtttttagaggtgaggaaagggggataggaattttaatattagtttgttttttttgtttttatgggtatagtgtaagtatatatatatatatatatatatatatatatagtttggagaaggtgggagggttggttttagaagtaggggggtagagttaagaagggggaaattaaagaggtggggagatatatatagatatatatttttttttttatttttatttttttttttttttttttgtttttttttttagatttttagggttttagttggggttggaggggagggggtttaattgagttatatttggtaggtattatttattgagggttggaagggtgtagtaggggtattttttatgttgtattgttttttttttgggatattttttttttttgagtgatttaagtggtattttggaggggaggaaatggttagaagggaagttggggagggggttagaagggaagttgttaatttaggtttttatttttgattttagtgtatgtttttatttttttttgttttttagttttggttttatttattttttggaaagtagtaggaagagtagtgatggtggagaggttggtagtgggaaggagggggtaaggaatttgagtaggagttttttgagggggatggggtgggaggttttaggtttatgattggggttggtagttagtaggggagtatggttgagagggttagtaaaattttagtaatgaaggatattaaagatttagggaggttaggtttttggtgtttatttattttagaaggggttagttggggggaaagatgggttaaaggttattg

SEQ ID NO: 127 - DNA, 2500 bp, Artificial Sequence
  chemically treated genomic DNA (Homo sapiens)
gttttattatttttaattttttaagattattttttttgggtaattaggtaggtggggttattgggtgattttatattttattatttaggtggttgtggtaatgaatattgttgagatattatttattattgagggtattatttatgtgttggatttagggttttgtaagtagaagagttataatttttgtataggtatggaattgtttattgttatattttgtagtaaggttagtttggggatgtatgggagtgggggaggtggagttggtttatagagaaggtttaatttagaagtagggtgggggttttttagggaattgggatgagtagtttgtatttttttagattttttgtataaatattgttttttttttttttttgattaaattgttagttagtttgtttttttttttttttaggttttagttaattagtgagttggtagggtaggttgggtggttgtagggaagtgtttttgtttgtatattgtttgggtttattagtatgagtttgaggaaattatagtgtttgagatttagaggattagtttgggtaatgttgtgttgttgtttaagagtttaggtgattgggttatttgagagaggagggaggggttggagttattgttttttgaagggattttgttttatttattatatttttttttagggatttatgatttaatgtattttgattttttggattttttattatatgagatattgttgttggttttggagtagttgtatgttttgggagtttttaattattttggggagtttattatggtgagttggggggtagtatgggtggaggtaggatgataggggttaggatggttttagggatttttgtagtagtagtgggaaatttgagggaggattgggtttaatttttttttttttttttttagtttggttgaaagatggtagagttgttggtggattttatgttgtttaaaatgattttagtttttgagaagtaagtttttgtttttatttgggtttttagtatataaataggttaggttttttttgtttttagggttttttttgtttgtttttttttgtttattatattattttttaatatataataaagtattagataattttgattgtttttttttgaggtttataagggtaagatatttgattttatttttgattttattgtgtttggttttttgaggaatttatttgtttttaaggtttttaattagaatatttagatgtagttgtggagggatgatttttaaatgttatttttttgttgttagagattttttttaaatgtatatagtgaatgtatattttttgtagaagttttagaattttttggtgttttttgtttttgtttttatggatgttttttttttgtgattgtgttttatttatggtttttatttttttgatttttaagttgttgttagaatttatttgttggttgttttgtagttattatgttaattagttttttttatatgaggaaatatttattatatagtgattattttttattttattatatttgtttttatgtgttttgttttgaatttatgtttttttttttttgttttaggtatagttgtttagaggagattttgatagtggttgttatgttttttgttaataattttattttttattgattaaaggataaggttgtttatgttgataatgtttgtgttaatttttttttttttggtggtgattatttggttttgttaaatgtttatatataggttattgggtttgggtgagtgggaatgagagatattgggggattttagttttgttgtatatttaattattttttttttttttttaattgtttttttagtgggttgagagtggttattttttttagtggtgttatgagaattttgtatagtttagattgatgtgttgagtttgggatgtgtgggaatagttggaagggtttttggaatgtgtggaagttggttttagtttttgttagggggattatatttgtgtatgtaaggttagtatttttttagttttttgttttttatttttagtatttttttaggagtaagtttttttgggggtatgtagtattttttttagtgtgagagtatgtttttttttttttgtgtatgatgtgtttttttagggtttttttttttttagattattgaaggtttatttttgggaagttttttatgtattttttatttttttagtttttttgaagtttgaattaaaaaggtagtgtatttttagggtttttagatgtttgttttttttattgatttttttttttgtttgttttttaggttattattgttggttatttttattatatggtatggttgatttggagtggttattgtatagtgaaatagtagtagatagtttttatttattttaatttttttttttttgagtaatagttatgttggttgttttattatgaatttgttttgattattaaagagtttatgagataggtgaggagaatattttgtgtttatg

SEQ ID NO: 128 - DNA, 2500 bp, Artificial Sequence
  chemically treated genomic DNA (Homo sapiens)
tgtgggtataggatgttttttttatttgttttatgaattttttggtggttaagataagtttgtggtagagtagttagtgtggttgttgtttaaagagggaggagttgggatgaatgaagattgtttgttgttgttttattgtgtggtagttattttgagttaattgtgttgtgtggtaaaagtaattagtagtgatggtttaaggagtgggtaggaaagaaaattaatggaaaaggtagatatttggggattttaagaatgtattatttttttagtttaggttttaggaaaattagagaggtaaggaatgtatgaagaattttttaggaatgaatttttagtggtttggggaagaaagggttttgggaggatatgttatatataaggggaagagggtatgtttttatgttggaggaaatgttgtatgtttttagagaagtttgtttttgggaaggtattgggggtggaaagtaggaggttgaagaaatgttgattttgtgtatatggatatagtttttttggtaggaattgagattaatttttatatgttttaagagtttttttagttgtttttgtatattttgggtttggtgtattgatttgaattgtataaagtttttatagtattattgggaagagtaattatttttagtttattgggaagatagttaaaaagaaaggagagataattaagtatatagtaggattaaagttttttagtgttttttatttttatttatttaagtttagtgatttgtgtgtaaatatttagtagaattaggtggttattgttagggagaaagaagttgatatgggtattgttagtatggatgattttgttttttggttggtagaagatggagttgttgatagagagtatggtagttattgttaggattttttttgaatagttgtatttgggataggaaggggaaagtatgagtttaaagtaagatatataggaatagatatggtggagtggggagtgattattgtgtgatggatgtttttttatgtggggaaggttggttggtataatggttataaagtagttagtagatagattttggtagtagtttgggggttaaggaagtaggggttatagatgaaatatagttataaaggagggatatttatggaggtaggagtaggaaatattggggaattttgaggtttttgtagaaagtgtgtatttattatgtgtatttggaaaagatttttgatagtagaggaatggtatttaaaggttatttttttatagttatatttaaatgttttagttggaaattttaggaataagtaagttttttaaggggttgggtgtagtggaattaaggataggattaagtgttttatttttgtgggttttaaaagggggtaattagagttatttaatattttattatgtgttaagggatagtatgatgaatagaaaaagatagataaaggggattttggagatagaggaggtttggtttgtttgtgtgttgggggtttaggtggaggtgagggtttattttttagaggttaagattattttggatagtatggggtttattggtagttttgttattttttgattagattaaggagaagagagagagagttgagtttagtttttttttaggttttttgttattattataggggtttttggagttattttgatttttattattttgtttttatttatgttgttttttgatttattgtggtgagttttttaaggtggttgagggtttttagagtatatagttgttttaaagttagtagtagtgttttatatggtggagggtttaggaaattaaagtgtattaggttatggatttttagaaagaggtgtgatggatggaatagagtttttttaaaggatagtgattttagtttttttttttttttttaggtagtttaattatttaagtttttgagtagtaatatgatattgtttaagttggttttttggattttaggtattgtggtttttttaagtttgtgttgataggtttaggtggtatataggtggaagtatttttttgtagttatttgatttgttttgttagtttgttgattggttgaggtttggaaagaaaggggaataggttggttgataatttggttagggaaaagaaaaaggtagtatttatgtaagaaatttggaaggatgtaaattgtttattttggttttttaggaagtttttattttgtttttgagttggattttttttgtgggttaattttattttttttatttttatgtatttttaggttgattttgttgtagggtgtgatagtgagtgattttatgtttgtgtgggggttgtagtttttttgtttatagaattttggatttagtatataaatgatgtttttaatggtgagtgatgttttagtaatgtttgttgttataattatttgagtgataggatatggggttatttagtgattttatttatttagttatttagaaaaagtaattttggaaagttaggagtagtgaagt

SEQ ID NO: 129 - DNA, 2500 bp, Artificial Sequence
  chemically treated genomic DNA (Homo sapiens)
ggttgattgtttgaggttaggagttttagattagtttagttaatatggtgaaattttatttttattaaaaatataaaaattagttaagtatggtggtatatgtttgtaattttagttatttgggaggtggaggtatgagaattgtttgaatttgggaggtagaggttgtagtgagttgagattattattgtattttagtttggtagatatagttaaatttagttttaaaaaagaagaaaaaggagtttaaatttttgtaaggatgttaattataattatttgaaagtaataggtatggtaagaagattggaaagaaatatattttatgggttgtttgatttgttagatagaatagaatattttagtatatttttttttgtattattttattttgtatagtttaaatttttttaaatggtaaatattttttttataattagggaaagggaaaagagaaaatatataatgttttttttttttttatattttatttgttttatttttttattgtttttgtggtttattttatttattttttttttttttttttttgagatgaagttttgtttttgttgtttaggttggagtgtaatggtatgattttggtttattataatttttgttttttggatttaagtgatttttttgttttagttttttgagtagttgggattataggtatgtgttattatatttggttaattttgtatttttagtagagagggagtttttttatgttggttaggttgtttaaatttttgattttaggtgatttgtttgttttggttttttaaagtgttgggattataggtatgagttattgtgtttagttagatttattttatttttaattatgaggaagtttaaaatttttagtttataagaaattggaggggtggagattatgaggttaattgaattttaaatgtttagttaggttgttttttttaagttatttttagttaggttgttatgtttggtttagagtattttttgagaatttttattgatggggaagaattagttttgttgagaggtggttttttgtagggtaggttgttatttttgtggtattaagtgaggtgtgagtttattttttaaaggttatttagatagaggaagtatttttaattggtatttttgatttttgggggagaggttttatttttatatgtatgtttagaggattatttgagtgttgggaaatagggggaatagggaaattattggaaaatgaatattagaaaaatttatattttgggggtaagttgttttggtttatgtttagttttgtgtttttgtttttattgtggggaattatagaattgatagaggataggttgagggatttatttttgttttttttgttttatgtgtattgttgttttatttttattttatattttattattaattgttgtagtttagaattttttttttttttttttttttttttttttttttttgagattgagttttattttgttgtttaggttggagtgtagtggtgtgattttagtttattgtaatttttgttttttaggtttaagtgattgttttgttttagttttttgagtagttgggattataggtgtatgttattatgtttggttaatttttgtatttttagtagagattgggttttatgatattggttaagttagatttgaatttttaattttaggtgatttatttgttttggttttttaaaatgttaggattataggtgtgaattattgtttttagtttagaattttttttttagtttatgtttttttagtgaaaataatatagtaatattatgtggaaagtttgaaaaatagaaaataagaattttatagttttatttttttttttagttgttggtattaataataatgtgtgtagtgtatattttttttttgtattttgtatgtagagtgtgttttaaagttgtaattagtgtttataaagtttttggtatttttttttttgtatataagtatattgtaattatttattttatggttatataattagtatttattattgttttaatggttatttgatgtgttgtggtgaaagtattataataaaattaattattttttatgggttatttgtgtttttgatatatttgttgttatgaataattttattgtgagtttttttatgttataatttttttttgttttaataatttttttaggatagatgtttagaattgggattattgggttaaaggaaatgagaattattttggtttttgatattatgttttagttgttttttggaggtttttaatagtgtagttttgttagtagtataggttgggggtttggggatattttattggtttttattttaagagttattgaatggtgaatataaagttgttttagtttttagtttgttttggaggggtgtatttgatgtatgatttttgttgatagtattagtaaagtaagttgtttttaaatttttaaattttgtatttttttatattattttttagttttat

SEQ ID NO: 130 - DNA, 2500 bp, Artificial Sequence
  chemically treated genomic DNA (Homo sapiens)
gtggggttgaaaggtaatatagggggatatagagtttaagggtttaagggtaatttgttttgttggtgttgttaatagaggttatatattaaatgtgtttttttagagtaggttgagggttggggtagttttgtgtttgttgtttagtgatttttggaataagagttggtgaggtatttttgagtttttggtttgtattgttggtagagttgtattgttagaaatttttagaaggtaattgagatatagtgttaggagttaaagtaatttttattttttttgatttaataattttagttttgggtatttgttttaagaaaattattaaagtaggaaaaagttatagtatggaagaatttatgatggggttatttatgatagtagatgtgttaggaatataaatgatttgtagaagatgattaattttgttatagtgtttttattgtaatgtattaaataattattgaaatgatgatgaatgttggttgtgtagttgtgaggtgaatgattataatgtatttgtgtataaaaaaggaagtgttaagaattttatgaatattgattgtaattttaaaatatgttttgtatgtaaaatataggaagggaatgtgtattatatatattgttattaatgttggtagttgggggagaaagtaggattatgagatttttgttttttgttttttaagttttttatataatgttgttgtattatttttattagaaaaatgtgggttaaaaaagaaattttgggttgggagtagtggtttatgtttgtaattttagtattttgggaggttgaggtgggtggattatttgaggttgggaatttgagtttagtttggttaatattatgaaatttggtttttattgaaaatataaaaattagttaggtgtggtggtatgtatttgtaattttagttatttaggaggttgaggtaggataattatttgaatttgggaggtagaggttgtagtgagttgagattatattattgtattttagtttgggtaatagagtgagatttagttttaaaaaaaaaaaaaaaaaagaaaaagaaagaaagaaattttgggttataataattaataatagagtgtggggtgggggtggggtagtaatatatatagaataggaggggtaggggtgggttttttagtttgttttttgttagttttgtggttttttatagtggagataggaatataaaattgaatgtggattaggatagtttatttttggaatgtgaatttttttaatgtttattttttaataatttttttattttttttgttttttaatatttagatggttttttgaatatgtatatggaaatgaggttttttttttaggaattggggatgttgattgagagtgttttttttgtttggatggtttttgggagatgagtttgtattttatttggtgttatagaggtggtgatttgttttgtaagagattgttttttagtagggttgatttttttttattggtaggaatttttgaaaaatattttaagttaggtataataatttggttgaggatgatttagaaaaggtagtttgattgagtatttggaatttaattaattttatgatttttatttttttaattttttatggattagaaattttgaatttttttataattagaaatgaaataagtttggttgggtgtggtggtttatgtttgtaattttagtattttgggaggttgaggtgggtagattatttgaggttaggagtttgagtagtttgattaatatggagaaattttttttttattaaaaatataaaattagttagatgtggtggtgtatgtttgtaattttagttatttgggaggttgaggtaggagaattgtttgaatttaggaggtagaggttgtagtgagttgagattatgttattgtattttagtttgggtgataagagtgaaattttattttaaaaaaaaaaaagaaggaaataaatgaaataagttataagagtgatagaggagtaggatagatggagtgtaaagaaggagaagatattatatatttttttttttttttttttttgattgtaaaagaaatgtttgttatttaagaaaatttggattatgtagaatagaataatatagaaaaaaatgtgttggaatattttattttatttaataaattaggtaatttgtgggatgtgtttttttttagtttttttgttatgtttgttatttttaaatggttgtgattagtatttttataaaaatttgggtttttttttttttttttttgagattgagtttggttgtatttgttaggttggagtgtagtggtgattttggtttattgtaatttttgttttttgggtttaagtaatttttgtgtttttattttttaagtaattgggattataggtatgtgttattatgtttggttaatttttgtatttttagtagagatggggttttattatgttggttagattggtttggaatttttgattttaggtgattagtt

SEQ ID NO: 131 - DNA, 2500 bp, Artificial Sequence
  chemically treated genomic DNA (Homo sapiens)
tgtgtgttattgtaatgatgtaataagtgggttgtagggttggatagatttttttgttttttgtaaggggttgtaaggtataaatagttgagtgtgggatagagttagatttgtttttgtgttaagttgttttagtgatttgtaaatgggaaattagaaatagtatttatattgatttgttataagggttaaatgaatttgtatttgttaagtgtttagaatgtgtttgaaatgtaagtatatttaggttttgtgatgggtttttgttttattgttagagtttgttaaataaataaatattgagattttggataagttttttattttttttggataaggaattttgttgaattggatattatttagtttttttatttgtaaagtagatttgttgtttatttgagaaatttaatttaaagggttaagtggagtgtttaggttatgatagattgaggaggaaggtagggagggattgaagagttagagaggttggagggaagtggttgtgagttggatgtggttgtgtgtgtttaagagaggggatattttttttttgtggttggaaggtagggttggaatttttattttatttttattttttttgtagaatggatatattaattttgataagtggaggaaggtgagtggagtgtttgggttggatgttggatttttttatttatgttttaggaaggggagggggaaaagttaggggtttttgagttttggtttttgtagtttgagggtttttttttaggagtttgtagttttttttgagttgtgatggttttagaatgaatgttgtggttataatttttaatttgattatgatatttagaggtggttataggggttttggttattgatagaggtttagaggtgattggtgggtgaggttgggattttagggttttggttaggtgtgggggattggtgttatgttttgagttttgtttattgtttttttaatttagttattgtgtattttgtgaggtggagttatttggttttagtgatttttttgttttatgggtgttttggttaatattggttattttgtagtggatagagtgagagatttattggttggggggtggttttttgggatttttatttttttttgatttttttaattttttgttattgtagggttttgggttttgttggggtttttattttgtttgtgttttgtgattggtttagtattgggggagatgaggtgtttataatttttgtttttttgttgatttggttggtttaggtgagttttgtttttgattttgattttgatgttgatttttattttgtaaatgttttttttttaaatttttttgtttttatgttagttttatgttgtttgtttttagtatatgaagtggttatttgttttgttattagattttgttttggaaagtagtttatttttgtatagtttagttgattttagttatttttttttattagtttttttttttaggtttttttgaggttattgttgtttagttttttgtggttttttgttgagtgggggtgtagaagaggtttttggggggattggatatgggggagagggatttgggttaggggtttttgattgttgtattatttgagtttagatggagttgggggaagatggtagtgtttataagagtattttggtgagggagttttgggatggagttggggtgaaggatggtgttttgttggattataaatgttgtttgaggtttgggtagttaaatggaattgaatgtagttttaattttgatttttggttttggtagttatgttttatttttaattttattttttaaattttagtttttaatagaagttgaaatttgttttattttgatggttattttgtattagttgttatattttaaatttttggttgttgtgttaaaattttagaattaatagtagtttttttatagggaagtagttttgttttattgggtattatgtgggttggtttatggggtataggaagttattatattgggtttttttgtttattttaaagttttggatataagtaatattttgtggttgggtttagtggttgagggtagaaggatgggaaattatggttgattgattgtttttttggttttttgttttgttaggtgataagttaggataaggttttaagtgttattagttgtgtttttaagaaaaataattgtgattttgtagtggttttagagtatgagttggtatagttgttattaggggagtgaggttagaggttatgagggaaaggtagatttgggaggagagtggagtatttttatatttgggtggttgtggggggaataattgtgtgtgtgttttatatttattttttgaatttttagagttgattattttagttttggttaatgtattttatgttatggatggagttttatatgatttttttttgtggtagtggtgaaggttttttattgttatatttggtgttattagtggtttgtttgttttaggaatttttttg

SEQ ID NO: 132 - DNA, 2500 bp, Artificial Sequence
  chemically treated genomic DNA (Homo sapiens)
tggaggagtttttgaggtagatgggttattggtgatgttaggtgtagtagtagaggatttttgttgttgttgtaggaggaaattgtgtgaagttttatttatggtgtagaatatattagttgaggttgggatagttagttttgaaggtttaggggatggatgtaaagtatatatatagttgttttttttatagttgtttagatgtggaagtattttattttttttttgagtttgttttttttttatggtttttgattttgtttttttggtagtagttgtattagtttatattttgaagttattgtagagttatgattgttttttttaaggatatgattgatgatatttggagttttgttttggtttgttatttggtagaataggagattaaaagagtaattaattagttatgattttttatttttttatttttagttattgaatttaattataaaatgttatttgtgtttaaggttttaaaatgaataggaaaatttaatatggtggttttttatattttataagttagtttatatggtgtttagtgaaatagagttgtttttttgtggggaaattgttgttgattttgaaattttaatatggtgattaaaagtttaaggtgtagtaattaatgtaaaatagttattaaaataaaataaattttagtttttattgaagattagagtttagaagataaaattaaaaataaaatataattgttaaaattaaaggttaaaattaaaattatatttaattttatttggttgtttaaattttagataatatttatagtttaataagatattattttttattttaattttattttaaggtttttttattaaaatgtttttatagatattgttatttttttttaattttatttggatttggatgatatggtaattagaggtttttggtttagattttttttttttatatttagtttttttggaggttttttttgtatttttatttagtggggagttataggaggttgagtggtggtgattttgagaaggtttaggggaggaggttggtggggagaggtggttggggttagttggattgtgtagggatggattgttttttaaggtagagtttagtgatgagatagatggttattttatgtgttaggaataaataatatgggattggtatgaaggtagggaggtttaaggaagaaatatttatagagtgagggttagtgttaaggttagagttaggagtagagtttatttgggttagttgagttagtagaggagtaggagttgtaggtgttttattttttttagtattgggttggttataggatataagtggggtagggattttaatagagtttaaaattttgtagtggtaggagattgggaggattagagaaaagtggaagttttaagaaattattttttagttagtgaattttttattttgtttattgtgagatgattaatgttggttgaagtatttgtggggtaggagggttattggaattaggtggttttattttataggatatatgatggttgggttaggggggtaataggtagagtttaggatatgatattaattttttatatttggttagaattttggagttttaattttatttgttagttatttttgagtttttgttagtggttggagtttttgtagttatttttggatattatggttaggttggaggttatagttatgatatttattttggagttgttgtaatttagaaaggattgtaaatttttgggaaggagtttttaaattgtaggagttaaaatttagggatttttgattttttttttttttttttttggaatatggatagggaagtttagtatttagtttagatattttgtttatttttttttgtttgttaaaattgatgtatttattttgtgaggaaaatggggatggggtgaaagttttaattttattttttggttatagagagagaatatttttttttttaaatatatatagttatatttaatttataattatttttttttagtttttttgattttttgatttttttttgtttttttttttaatttattatggtttaagtattttatttgattttttaaattgaattttttaggtagataatgagtttgttttgtagatgagaggattggatagtatttaatttgataggattttttatttagagaggataaggaatttgtttaaggttttagtatttgtttatttaataaattttagtaatagagtaggagtttattataaaatttagatgtgtttatgttttaggtatgttttaagtatttgataaatataaatttatttaatttttataatagattaatgtagatgttatttttagttttttatttatagattattgaggtgatttggtatagaaatagatttggttttgttttatatttagttatttgtgttttatagttttttgtaaggggtgggggggtttgtttgattttgtagtttatttgttatattattgtaatgatatata

SEQ ID NO: 133 - DNA, 2500 bp, Artificial Sequence
  chemically treated genomic DNA (Homo sapiens)
ttttatttttttttgttttttttttttgtgtgtgtgttttgggtattttaatttggattttttttttttttttttaatgtattttattgtgtgtttaatttaggagttgttttgggagtagtttttgttttttggttttattggtatagaatgattatagtatatagattgaggtatagagtttggttttatttggttattttattgatttggttttttagtttagtttggtattagtgataaggtttgtgtgggttggatttgggtattttgagttgggtggagagaagggaaggattaaaggtgggatatagaggatatatgtttgttatgggataatgttttttgtttttttgtgattataggatttagatttatgtttagtggtaggagatagtttgaaagtagagaaggagttaatagtattagttattgaggtaagtgggagtaagagtttggtggaaaggtttaagatttttggggaagattgttgggagtgattagggtgtttaggatgttagatatttttttttatgaggttttttttttttaggttatttttgtattatgagattgggagttgttttttagtgttgttgtttttgttgagttataatttaagaatttggattttgggtattgtgttttggagtttagttttttaggttagtgtttgtattttgaggttttttatggtagtgttgggttttttagtttttaggtaggttttgttttttattgtatgatttttttagtgaataataatttttttttgtttggtatgtatttataattaagtttttttatgttgtagagttgtgagatattattttgttatattatttttttttttattttttgtttttatgggtgggatggtgatttttttttttgattatagatattaaagttgttttaattgtgttttttttttgtagatttttgggggagttatggatttttaattatatttaaatagtggaggtttttgttttgggatatttttattgtatttttataggtaagatttgatgtttgtggattatagaagtatttggagatgtgttttggggagagggaaggggaagatatagttttagggtattagaagttagtggatttaaggtattgttaggattttggttttttaatagtttttttttttataatttatttttagattatagtttttatatttattttttggtttagttttttttttagtattgttttttggggtagtttttaagggttagtttttggatttttttataatgtaagttatagagttggggaagttgttggttggaggagttttttattttttatttttttttttttattttttggttttttgttttagttttttgtttgatatattgttgttttaggtaagaggggggtaggtattagatattgggggatagggtagggagaatgattttgtgggggttgatatatttttttttgttttttgataggtatgttaggatttgttattttttttggatttttattttatttttttgtagtttggtggttaaagtggttttttttttttaggggtttttgtttagtaggtatattgtatttttatattttttttttatttgatttttttgtttagttgttggttttgattttttttggttttttgatatttttttttgtttttaatatgtatatttaaattttttgttatagatgtttttatttatggtagatttatagttgtttgtggtgaattttggttttttgttgttagtattattttttgttttattttttttttttttgttatttgtgggttttgttttgtagttttttagtttggttgtgtggtttttatttgtttttgttatttgggtgttgtttttatttgttaggtttttttttgttagtttggggtgagtagaggtaaggtataggaattgaggggttagggagtgttaagatttgggagtagggattttgtattttaaggtaggtagtttatgatttttttttttttagttgtatttagtggaattaaagttgttttaggattattaaaaattgagtagtaattttgggggatttggattattatggatttttttaattggaaggtgaaatggaatagggatgtggattttttaagtgtttttttattttggaattagggtttggattttaggtttgttttagatgtttttttttttttaggtttttttttggttttaatttttgttttaaggttatgttttttatttatagtggagttttttgtatttagtgtgttgatttttattagtaggtgaaggagaaatttttgtggttttaattttaaatttgagttgttatttgattttttgtttttttattttattgttgattttttattgtgatttattgtttaatatatgtttgttttttaggtttttttattagatgttttgtgttggatatttaagttttgggagtggatagggttgttattttgagaagggtttttttgatg

SEQ ID NO: 134 - DNA, 2500 bp, Artificial Sequence
  chemically treated genomic DNA (Homo sapiens)
tgttgggagggttttttttgaggtggtagttttgtttgtttttaaggtttaggtatttagtgtagggtatttggtggggaggtttaggggataggtatgtgttaaatagtgagttatagtgagaggttagtgatgagatggaaggataggaaattaggtggtaatttgaatttagagttggggttataagggttttttttttatttgttggtaaaggttgatgtgttgggtgtggaagattttattgtaggtggaaggtgtggttttgagatgggaattgaggttagagaaggatttaagggaagaagggtgtttaaggtaagtttaggatttagattttggttttaaagtaaggaagtatttggaaagtttatatttttattttgttttattttttagttgggggagtttgtgatgatttaggttttttaaggttgttgtttagtttttgataattttggaatggttttagttttattggatgtagttgaggggaaaaaaattatgagttgtttattttgaaatatagaatttttatttttaagttttggtgttttttagttttttagtttttgtattttatttttgtttgttttaagttagtggggaagggtttggtaggtgaaggtagtatttgagtagtaggagtaggtgggggttgtatagttaggttggggggttgtagagtagggtttataggtaatagagaaaggggaggtggggtaggaggtggtgttggtggtagggagttaaagtttattataggtagttgtgagtttattatgggtagaagtatttgtaataagaaatttgggtgtgtatgttgggggtagggaggaatgttagaaaattagggaaaattaaagttagtaattggatagagaaattaaatgaaggggaagtgtgaagatataatatatttgttgggtaggagtttttgaagggagaaagttattttggttattaggttgtagaggagtagaataaaaatttgaaggggatggtagattttggtgtatttgttgggaaatagggagaaatatattaatttttataaaattattttttttattttattttttaatatttaatatttgttttttttttatttgaagtaatgatgtgttaggtaaaggattggggtagaaagttggagagtagaggaaggaaggtggagggtagagaatttttttagttggtaatttttttagttttgtagtttgtattgtggagaaatttagaaattggtttttgagagttattttagagagtagtgttgagggaggggttgggttggggggtaggtataggggttgtgatttgaaaataaattgtggggagaaaagttgttaggaagttagagttttagtaatgttttaagtttattagtttttagtattttagaattgtgttttttttttttttttttttgaaatatatttttaagtatttttgtgatttataggtattgagttttatttgtaagggtgtagtgagggtgttttagggtggaagtttttattgtttggatgtaattgagagtttatggtttttttagagatttgtaggagaggagtatggttgaaatagttttagtatttgtggttaagaaaaaagattattattttatttatagaagtaaaaagtagggagaaaaatgatgtgataaagtggtattttataattttgtaatgtagaaaggtttgattataaatatatattaggtagaaaaaaattattatttattgaaggggttatgtaatgggaagtggggtttatttgagaattggaaggtttagtattgttatagaaaattttaggatataggtgttggtttgaggagttgggttttgggatatagtgtttagaatttaggtttttggattgtggtttagtagaggtagtagtattgggaagtagtttttagttttgtgatataggaatggtttgggaaggagaggttttgtggagagggatgtttggtattttggatgttttggttatttttagtaattttttttagaaattttgggtttttttattaaatttttatttttatttattttagtgattgatgttgttagttttttttttgtttttaagttgttttttattattaggtgtaagtttgagttttgtgattataagaaggtaggagatattgttttgtgatagatatgtgttttttatgttttatttttagttttttttttttttttatttaatttaggatatttagatttagtttatatagattttgttattagtgttaaattggattgggggattaggttgatgggatggttgaatggggttaggttttgtgttttggtttgtatgttgtgattgttttgtgttaatggggttagggggtagaggttgtttttggggtagtttttggattgggtatatagtaaagtgtattgggggagggaaagggaaatttaaattggaatgtttagaatatatatgtagagagaaaaagtagaaaaaggtaggg

SEQ ID NO: 135 - DNA, 2500 bp, Artificial Sequence
  chemically treated genomic DNA (Homo sapiens)
tttttttttttttttttgagagatatagttttgtttgttttgttgtttaggttggagtgtggttgtaagattatggtttattatagtgttgatttttttggttgaagtgatttttttattttattttttttggtagttgggattatgggtgtgtgttattatttttggttaatattttttatttttatttttatttttagagatgaggttttggtgtgttgtgtaggttggtttttaattttttagtttaagtaatttttttttagtttttttagagtgttgagattataggtgtgagttattatgtttggttttttttattttttgaatttttttttagttgtttaattaatagagggggttgggtgtagtggtttatatttgtaattttagtattttgggaggttgaggtaggaggattatttgagtttaggagtttgagattagtttgggtaatatggtgaaatttttgttttataaaaaaattaaaaattagttgagtgtggtagtgtgtatttgtgtttttagttatttaggagtttgaggtgggaggattttttgagtttaagagggatagagtgaaattttgtttgtaaaaaaaaataaaaaattttatttaggatgatgaagatggggtgaagttatgaggaagaaagagaatgaatgttggttagttggtttaaaattaagtaattgtgtttgggtgtggtggtttatgtttgtaattttagtattttgggaggttgaggtgagtggattatgaggttaggagtttgagattagtttggttaatatggtgaaattttatttttattaaaaatataaaaatagttgggtgtggtggtatgtgtttgtaattttagttatttgggaggttgaggtaggagaattgtttgaatttgggaggtggaggttgaagtgagttgagattatgttattgtttgatagtggggttgggttgtgggggtaggaaagattaagtaattgtttaaattaggaatagagttaagtgggagggtagagattaggagttgtttagatttttttatttttttttttattgataggtattatgaaaggtagtggtagaaaagttagtttgggtagtagagtgagaggtttgggttttgttggagaagaattgattttataggttattggaagatagtgaagagagtagtgaggagattgtgagtagggttggaagtagtttttagaagaaatgtaaaaagtggaaatattttaggaagaagtgtgaggaagaagaggaggaagaggtttttgagaaagggaagaagaaaatagggtaagttagaagtagggtgagagaggatggggtaggttgaagtgttttttatgtttttatttaattttttggatgggttgtagggggagtaaatagtagatagagaagttagagttggaagatgagtgggaatggatagagtgtgaatgtttttaggatttggaggagtgtgatgtttttgttgagtgggtttgatagtgggataaggattggatttgaaatgttttggaatggttagataagaaggtgaataggagtagtatgttttgtaaatttttaagattttagggtgaaatttgaggttggttgtgagtgtagagatagtgatttttgggaagataaggggttgtttttagtgagatgtttatttttgtggtgagagaagttttgtgtattttgtggttaagataattgtttgttgtatttgtaattagagagattttttattgagaggggatattttttgtgttagggtgtatttgaatgatttttgtgattttagaggggagtagttgttagtgtgggggttttttggttttatatttttttatttttgtttttttttttaggtttatgaagaggtttagaagtgttttaagatggttgaggaagattggaaggttatggtgagttttagggtttagggagttaagattagaagataaaaggaaagattttttgatagagtgtatagggagagaggatatagaggaagtatagtgtggatgttgatggggtggttaggtttttagaagaggggtttggttgttaggagttagttgaggatagatttatgttgttgagggaaggattttttttaagttgtagggggaaggaggttatttataagttttttttgatttttaattttaggattaaatatattttattagtgaatgaaattgtgagttttttttatttttgagttttaatgagatatgaggtagttggaatgttgttaagaaggttgttggagggtaagggtagggtagtagttttattgtatagggatgtgttgattatttagtttaggtatattatttttaaatatttttttattatttaatttttgtattttttatgtggttttgtgatttttttgtgtttttttattggatagggatagagtttttgtaatttataaattggattttttatggtgtgaaattaggtagggtaagttgttttttaaag

SEQ ID NO: 136 - DNA, 2500 bp, Artificial Sequence
  chemically treated genomic DNA (Homo sapiens)
ttttggaaaatagtttattttatttagttttatattataaaaagtttagtttatgaattataagggttttgtttttgtttagtgagaagatatagggagattataaagttatataaggggtgtaggaattaggtggtgggaaggtatttggagatggtgtgtttaagttgaatggttagtatatttttgtatagtgggattgttgttttgtttttgttttttagtaatttttttgataatattttagttgttttatattttattaggatttaggaatagggaaagtttataattttatttattaatagagtatatttgattttaaagttaagagttaaggaggatttatgggtagtttttttttttttataatttaagaaggattttttttttaataatataagtttatttttagttggtttttaataattaagttttttttttagaaatttgattattttattagtatttatattgtgttttttttgtattttttttttttatatattttattagaaagtttttttttttgttttttgattttggttttttaggttttgggatttattatggttttttggttttttttggttattttgaggtgtttttgagtttttttataagtttagaagaaaaaataagaatggaggggtgtgaggttaaagagtttttatattgatagttgtttttttttagaattataaggattatttagatgtgttttaatataaaaaatgtttttttttagtgaggaatttttttgattgtaggtatagtagatagttgttttagttataggatgtatagggttttttttattatagaggtgaatattttattagagatagttttttgtttttttagagattattatttttgtatttatagttaattttagattttattttgggattttggggatttatagaatatgttgtttttatttatttttttgtttgattgttttaggatattttgagtttgatttttgttttgttgttgaatttgtttagtaaaggtattatgtttttttaggttttgaaggtgtttatgttttgtttgtttttatttattttttgattttggtttttttgtttgttgtttattttttttgtagtttatttaggggattaaataagggtatagagaatattttagtttgttttatttttttttattttgtttttgatttattttgtttttttttttttttttttagaagttttttttttttttttttttttatgtttttttttgaggtgtttttgttttttatgttttttttggaggttgtttttagttttatttatagtttttttattgttttttttattgttttttagtaatttataagattggtttttttttagtagggtttgggttttttgttttgttgtttgagttggtttttttattattgttttttgtggtatttgttagtagaggggaagataaggaggtttgagtaatttttgatttttgtttttttatttagttttgtttttaatttaagtaattatttagttttttttgtttttgtggtttggttttattgttaggtaatggtgtgattttggtttattttaatttttgttttttaggtttaagtaatttttttgttttagttttttaagtagttgagattataggtatatgttattatgtttgattatttttgtatttttagtagagatgaggttttattatgttggttaggttggttttaaatttttgattttatgatttatttattttagttttttaaagtgttgggattataggtatgagttattgtatttgggtataattatttagttttaaattagttaattagtatttatttttttttttttttatggttttattttatttttattattttgaatggggttttttatttttttttatagatagggttttattttgttttttttgggtttaagggatttttttattttaggtttttaagtagttagaaatataggtgtatattattatgtttaattaatttttaatttttttgtaggatgaaggttttgttatgttgtttaggttggttttgaatttttgggtttaagtaatttttttgttttagttttttggggtgttgggattataggtgtgagttattgtatttggttttttttgttaattaaatgattgaaaggaagtttagaagatgaggggggttgggtatggtggtttatgtttgtaattttagtattttgagggggttgagagaggattgtttgagttgaggagttagagattagtttgtgtaatatattaaggttttatttttaaaaataaaaataaaaataaaagatattagttgggggtggtggtgtgtgtttgtagttttagttattggggaagatgaggtgggagggttgttttaattagggaggttgatgttgtagtgagttgtgattttatgattgtattttagtttgggtgatggggtgagtgagattgtgttttttaaaaaaaaaaaaaagaa

SEQ ID NO: 137 - DNA, 22 bp, Artificial Sequence
  PRIMER
cctccccctacattactatctc

SEQ ID NO: 138 - DNA, 22 bp, Artificial Sequence
  PRIMER
taggatggaagattaggatttg

SEQ ID NO: 139 - DNA, 22 bp, Artificial Sequence
  PRIMER
tctttacaacccctaccttaac

SEQ ID NO: 140 - DNA, 22 bp, Artificial Sequence
  PRIMER
tgagagatgtggaaattattga

SEQ ID NO: 141 - DNA, 22 bp, Artificial Sequence
  PRIMER
ccatcaactaacttcttcccta

SEQ ID NO: 142 - DNA, 22 bp, Artificial Sequence
  PRIMER
attggtggttttaagtatgtgg

SEQ ID NO: 143 - DNA, 20 bp, Artificial Sequence
  PRIMER
tgtggtatttggggttagag

SEQ ID NO: 144 - DNA, 22 bp, Artificial Sequence
  PRIMER
ctcctacaaaatctccaaaact

SEQ ID NO: 145 - DNA, 22 bp, Artificial Sequence
  PRIMER
aacccctcaccttttaataact

SEQ ID NO: 146 - DNA, 22 bp, Artificial Sequence
  PRIMER
tgaagtggtagagatgttgtgt

SEQ ID NO: 147 - DNA, 22 bp, Artificial Sequence
  PRIMER
atcctaaccaacctctaactcc

SEQ ID NO: 148 - DNA, 22 bp, Artificial Sequence
  PRIMER
aggatgatattgtagtggggta

SEQ ID NO: 149 - DNA, 22 bp, Artificial Sequence
  PRIMER
ttggatgtaggaaaaaggttag

SEQ ID NO: 150 - DNA, 22 bp, Artificial Sequence
  PRIMER
ccctcctataataaaaaccaaa

SEQ ID NO: 151 - DNA, 22 bp, Artificial Sequence
  PRIMER
taggaaaaggagttggattttt

SEQ ID NO: 152 - DNA, 22 bp, Artificial Sequence
  PRIMER
ccccctacctaacctataatca

SEQ ID NO: 153 - DNA, 22 bp, Artificial Sequence
  PRIMER
ttgaggaaatgagaggtagaga

SEQ ID NO: 154 - DNA, 22 bp, Artificial Sequence
  PRIMER
tacccatccttaaaatcacaat

SEQ ID NO: 155 - DNA, 23 bp, Artificial Sequence
  PRIMER
tcaactataactcaatcccctaa

SEQ ID NO: 156 - DNA, 21 bp, Artificial Sequence
  PRIMER
gggttttattggtatgggtag

SEQ ID NO: 157 - DNA, 22 bp, Artificial Sequence
  PRIMER
acctctcaaaaatccaaactaa

SEQ ID NO: 158 - DNA, 21 bp, Artificial Sequence
  PRIMER
tgagaagagtagagggtggtt

SEQ ID NO: 159 - DNA, 21 bp, Artificial Sequence
  PRIMER
cttaattcaccaacatccaac

SEQ ID NO: 160 - DNA, 22 bp, Artificial Sequence
  PRIMER
tttggtaagagataggttaggg

SEQ ID NO: 161 - DNA, 24 bp, Artificial Sequence
  PRIMER
accctcaaaaatataacataacct

SEQ ID NO: 162 - DNA, 22 bp, Artificial Sequence
  PRIMER
aagttgtaggtggatggagtag

SEQ ID NO: 163 - DNA, 22 bp, Artificial Sequence
  PRIMER
cctcctaaattccaaatcctat

SEQ ID NO: 164 - DNA, 20 bp, Artificial Sequence
  PRIMER
ttatggttagagatggggtg

SEQ ID NO: 165 - DNA, 22 bp, Artificial Sequence
  PRIMER
ttaggaggttattggttttagg

SEQ ID NO: 166 - DNA, 22 bp, Artificial Sequence
  PRIMER
cactcccctattatttccacta

SEQ ID NO: 167 - DNA, 22 bp, Artificial Sequence
  PRIMER
cacaataactccccaattaaaa

SEQ ID NO: 168 - DNA, 21 bp, Artificial Sequence
  PRIMER
agggatatggtttgggtataa

SEQ ID NO: 169 - DNA, 23 bp, Artificial Sequence
  PRIMER
aaaattaaaaccctcctttctta

SEQ ID NO: 170 - DNA, 22 bp, Artificial Sequence
  PRIMER
agagttagggatatttgggaat

SEQ ID NO: 171 - DNA, 22 bp, Artificial Sequence
  PRIMER
gggtataaagttgagaagaagg

SEQ ID NO: 172 - DNA, 21 bp, Artificial Sequence
  PRIMER
tacccttaaaaacccaaaatc

SEQ ID NO: 173 - DNA, 22 bp, Artificial Sequence
  PRIMER
aatatgtttttggtagagggtg

SEQ ID NO: 174 - DNA, 22 bp, Artificial Sequence
  PRIMER
taaaatccctaaacccacctaa

SEQ ID NO: 175 - DNA, 21 bp, Artificial Sequence
  PRIMER
gtgttattgtgggaaggtttt

SEQ ID NO: 176 - DNA, 21 bp, Artificial Sequence
  PRIMER
taccccttcaatttactcctc

SEQ ID NO: 177 - DNA, 21 bp, Artificial Sequence
  PRIMER
aattcaacctccaaaatccta

SEQ ID NO: 178 - DNA, 22 bp, Artificial Sequence
  PRIMER
gaggaagagaatttgtttggta

SEQ ID NO: 179 - DNA, 21 bp, Artificial Sequence
  PRIMER
acttacctctcccctcctact

SEQ ID NO: 180 - DNA, 23 bp, Artificial Sequence
  PRIMER
gatggttagttatagttggggtt

SEQ ID NO: 181 - DNA, 22 bp, Artificial Sequence
  PRIMER
aaccaactccctcttcctatac

SEQ ID NO: 182 - DNA, 23 bp, Artificial Sequence
  PRIMER
gatggtgttttattttgaatttt

SEQ ID NO: 183 - DNA, 22 bp, Artificial Sequence
  PRIMER
aacaaatctacccacttattcc

SEQ ID NO: 184 - DNA, 23 bp, Artificial Sequence
  PRIMER
ggaggagtttaggattttaatgt

SEQ ID NO: 185 - DNA, 22 bp, Artificial Sequence
  PRIMER
ttcaaacacaactcacctaaaa

SEQ ID NO: 186 - DNA, 25 bp, Artificial Sequence
  PRIMER
aatgagaaatgattaggatttagaa

SEQ ID NO: 187 - DNA, 22 bp, Artificial Sequence
  PRIMER
tttctattctcctctatcccaa

SEQ ID NO: 188 - DNA, 22 bp, Artificial Sequence
  PRIMER
gtggtatgtgtttggaatttta

SEQ ID NO: 189 - DNA, 22 bp, Artificial Sequence
  PRIMER
gattttagtgtggttttggatt

SEQ ID NO: 190 - DNA, 24 bp, Artificial Sequence
  PRIMER
tcaaacatttaccattcaaataaa

SEQ ID NO: 191 - DNA, 22 bp, Artificial Sequence
  PRIMER
ggaggttaaaagaggttgaata

SEQ ID NO: 192 - DNA, 22 bp, Artificial Sequence
  PRIMER
aacctactccaccaaactaaaa

SEQ ID NO: 193 - DNA, 22 bp, Artificial Sequence
  PRIMER
cctcccatattaccaaaactaa

SEQ ID NO: 194 - DNA, 22 bp, Artificial Sequence
  PRIMER
tagaagtaggggaaagagtgag

SEQ ID NO: 195 - DNA, 22 bp, Artificial Sequence
  PRIMER
aaattatcaaccaacctattcc

SEQ ID NO: 196 - DNA, 22 bp, Artificial Sequence
  PRIMER
tattttggatagtatggggttt

SEQ ID NO: 197 - DNA, 21 bp, Artificial Sequence
  PRIMER
cctactttctcccccaactac

SEQ ID NO: 198 - DNA, 23 bp, Artificial Sequence
  PRIMER
tgttggtgttgttaatagaggtt

SEQ ID NO: 199 - DNA, 22 bp, Artificial Sequence
  PRIMER
ctccaacctaaccataatatcc

SEQ ID NO: 200 - DNA, 22 bp, Artificial Sequence
  PRIMER
tagggaggtttaaggaagaaat

SEQ ID NO: 201 - DNA, 20 bp, Artificial Sequence
  PRIMER
cctaaccccattaacacaaa

SEQ ID NO: 202 - DNA, 22 bp, Artificial Sequence
  PRIMER
tttatttgagaattggaaggtt

SEQ ID NO: 203 - DNA, 22 bp, Artificial Sequence
  PRIMER
ggtgaagttatgaggaagaaag

SEQ ID NO: 204 - DNA, 22 bp, Artificial Sequence
  PRIMER
tacttccaaccctactcacaat

SEQ ID NO: 205 - DNA, 4647455 bp, Homo Sapiens (residues 1-1,549,152 of 4,647,455)
  unsure (4267840): unknown base
gatctcgagctcctgaactcagctgatccgcctacctcggcctcccaatgtgctgggattacaggcatgagccaccgagcccggcccctcggctcctctttggctgtaggaaaccaggtctttccctcccaagggaggtgaactacaagcttctgttccacaggaaaacataaccctttttgtccaaaactgacaccgctttgagagcgaccagcggctttttccatctctgaaaataattttctcaactgtgtattttgaaagtctcggagtttcgccagaagcgtctttcgttcggaaaaaattctaaacattccttctttagagaaagctgagatcacagcgctcccatgactaatgattggacccacttttgccgcccaaccaagattctatgagtggtggaaatgtaggggagaatgaggaaaggtctgtagtctgtcagatatgggtggagtgggggtgggggggggaggagagaaatctaatggatgttttccaagggcgatttttttttcttctctttctgttttttattcccccccgatttcttaatagtaatgagaaacggcagcaaaggagaacgagtcttttttttttttttttttttttttgtgatggagtcttgctcagtcgcccaggctggagtgcagtggcgcgatctcggctcactgcaagctcagcctcccgggtttatgcaattctcctgtctcagcctctggagtagctgggactacaggtgcccgccaccacgcccggctaatttttttttttttttgtatttttagtagagatggggtttcaccatgttagccaggatggtctaggagaacgagtcttctatgaccggcatgcctgttgcttcactctcaggggatcttgaataagcagcttctctatttcagtaaataactataaagctgtgctgaagcagtcaggttgggaggctgaaggagtgttaggacccatagtacaaatgaatgagtaccaaatggcttaccttcgctgtgagtaggaaaaacacaagctagtgtatgcacaaagaaaaaagaaaagactggaactaagtattcaaagactgaaacgaaatgttcaacgatagatataaggaaatgtacttgtggaagtgctggggatcgaacccagagcctcatgaatgttaagcatacgctctaccactgagctacacccccacttacaatgccgttttcttactgatttattatatgctattatctaaaggtgagggcttaaggcatgataggttaaagtccgctatgttttaactcctgtttctgaaacttctgaatggaatcttgtcttgacgctgtgtcaagaggagaaaggcattctggaccgaaagacccttggatcctctcacagccgtcatctatttcaaggactgctgttagccaactttctttgtcagtttccgtccacctggagcgaagttccaagattgaatcttctggtatgtcttcagattctctcctttttaaaaaaacctcctctatggagctgccaacacacacacacacacacacacacgcgcgcgcgatagtgccagagaatataaagacgagttctgtgagtgctgcagaggaaacgtagatccaggtgaggagacaagacaagatgttaatgcacaaaagtcaactaaaaacgaatttaaatcttaaacttaagcccctaaactgtaaaattccttgaagaaaacaggggggaatattcttgacattggtttaggcaatggtttcttgagtatgacaccaaaagcacaggcaacaaaagcaaaaatggataagcgagactatagcaaactaaaaagcttcttcacaggaaagaaaacaatcaacaaaggaaaaaggcaagctatggaatgggagaaaatatttgcaaatcatttatctgataaggggttaatatacaaaataaattttttaaaccgctacaagtcaatagccacacacacacacacacacacacacaccccttagaatcccaaataacctgatttttaaaacgagcataggacttgaatagacatgtctccaaagaagacatacaaatagccactaggtatgtgaagaggtgctcttaacatcactaatcatcaaggaaatgcaaatcaaaatcacaatagataccacctcacacctattaggatgtctgttattaaaaagaaaaaactcaaaaggtaagtgttagcaaagatgtagagaaattggaacccttctacactgttggtgtgtaaaatgatgacaccactatggaaaatagtaaggggtcgcctcaaaagataaaaatagaactaccatatgatccagcaatcccacttctgggtatatgtccccaaaaaatcgaaattagaatttcaaagaaacatatgcactcccatgttcactgcagcattatttacaataaccaagataagggaacaatccaagtgtccattgagagatgagtggacaaagaaaatgtggtatatacatacaatggaatattattcagccttttataaaaaagaaattctgccatttgcaccagcatcaatgattaacctggaggacattatgctaagtgaaataagccagtcacagaaggacaaatatttcataattccacttatatgaggtatctaaaatagtcaaactcataaatgcagagaacagaatggtgattgtcagggaccagaggcagagggaaatggggagttgttgctcggtgagttaaaattttagttatgaaacatgaataagttctagagatctattgcacaacctagtgccttcagttaacaataccataatgtacacttaaaattttgttaaaaagataactcggccgggagcggtggctcacgcctgtaatctcagcactttgggaggccgaggcgggcggatcacgaggtcaggagatcgagaccatcctggctaacgcggtgaaaccccgtctctactaaaaatgttttaaaaaattagccgggcgcggtggcgggcgcctgtagtcccagctactcgagaggctgaggcaggagaatggcgtgaacccggaagtcggaggttgcagtgagccgagatcgcaccactgcactctagcctgggcgacaggcgagactcagtctcaaaataaaaaaaaaaaaaaaaaagataactctgatgtttaagtcttcttaccacccatgaacatgaaagaacacaaagaaacttttggagttgataagtgtgtttattaccgattgtggaaatagcattataaatgtatgcatatgtcctcactcatatgcttaccttcaacgtgtaggggttttgcatatatcaactgtacttcaataaagttgttaataactcctgaaaacaaccaaacaagcaaagacaagaggttaattcacaacattgacaaaaacaaagagtgacaaaggtagcagttttgcacaaggttgcgtccaacatctggatttggaaatgtggcagcggcttcatcggcgactctacagctataggtttttttgtttttgattttttatagagacgggatgggggaagggggcgggtcggtcttctccctgtgttgcccaggctggtcttgaattcctgggcttaagcaatactcccgcctccgcctccaaaagtgctcggattactggtgtttgccgccaagcctgactagctctggttttaaagacaacacaaacgaagccgaagacagaggactctttcagagcaaatttttttgagcaaggaggaaagcacaaaggaagctggtctcaacctgagaaaaccaattcaccctttgtaaaaccctccctacacccccacaagtgagaaaatttcatcagtccctgaagtgcagaaagtagacccttcccatctgtagccaaaatgtggtgcgactgtttaatccagatacgaattttggagaacattgtaaacccagcaggggcgtaagggagagtagggagaagtttgtccctaatgtacaggttatgttcttactatactagaaaggcaagtggctgggaactgaaatgagctgaggagtggacgcaagggaaggctttgaaaaggaaggaagggctcttggagccgggagggataacactgagtggaggagagaagaagcagcggagaagaaggcagaagaaaaatcggggacgcgtctttaaagacggatagtattgagacaagcgtggaggaagaaagcagccaagcgccgcgtctctgccaagctttctctaggccctggggaagagagaaggctctaggtgagtggtttcaaagtgtatatcccacagaagggtacggctcgtgttgcccaagattttgtgactctgagagtgcctcactgcactgcactctccatcgcaggaaacaggctgagcattttcgagggcgtgtggttgagtattcgtggagcagtagcccctggtattggaggtttgaggaaagtgacgttgtgtcagttctcatgtggaagcagcctgcagctttgatgcaggcagcaactgtttagtttgtgtttctttttgtttgtttgtttattttcgcgtgtttgggtttaaaatacaagagaaagaatgaggaagaaaggttaagtagtgactgaacgttttgggttagagtagatacccactaaaaccatcgtacttctggctagctcagctggaaatgcatcaggccactagtccggaaatttaggaatcacgatcctgttctgatgtagatacttttcattttcccatacttctttttgattcatactcaacaggctactgaacccagctttctcctggagcaaccgggagggtatttgcggtgcgttttgctgcttatattctctctagtctcagcggaagagacaagatttgaacggggaaagtcggatttgcagagaggtattcattcaaggctcttttctgccctactgtcaagtggatgaacaaaacgctgacttaagatatgaggaggattgcagtgttgagagtgcaaaaagtgtcaagtcaaaacatggacatattttgctcataatgtagataaattattttggtagacataaattttattattattattatatttatttattttttgagacggactctcgctctgtcgcccaggctggactgcagtggcgcgatcgcggctctctgcaacttccgcctaccgggatcaagcgattgtcctgcctcagcctcccgagtagctgggagtacaggcgcccgccaccacacccgtttaatttttgtatttttagtagagacagggtttcaccatattattcgggctggtctcgaactcctgaccccaggtgatccgcccgcctcggtctcccaaagtgctgggattacaggcgtgagccacagcacccggccataaatttattaatataaaaaattattggtcaggagcagtggcttacacctcaaatcccagcactttgggagaccaaagcaggaggatcaattgagttcaggagttggagaccagcctggctaacatagtgagagcctgtctctacaaaaaaatagaaaaattagccaggtatggtggtgcacacctgtggtcccagctacaccagaggccaaggcaggaggattgcctgggcctaggagtttgaggtagcagtgagccatgcttgcagtgccactgcactccagcctgggtgacagggcgagacctcaactcaaaaaataaataaaataaactttacttaaaaaaaattactgaggggacagccagagtggctcacgcctgtaatcctagcattttcggagaccaagacaagagaactgagtccaggagtttgtgctcaagtaataacaatactatcagcactcaatcttggtatcttaaaacttgacatttaaatgaaattttaatttgagtcaattaagaatagaatattccacttttgcataattaaccatgaattcacacaacaaatcagaatttatttatttcatttttattattattattttttgagatggtgtctcactctgccacccaggctggggtgccagtggcgtgatctcagttcactgcaacctccacctcccgggttcaagtgattctcgtgtctcagcctccctagcagctgggattacaggcgcacgccaccaaacccagctaattcttgtgtttttagtagagatggatttcgccatgttggccaggctggtcttgacctcctgacctgagatgatccgcccatctcggcctcccaaaatgctgggattacaggcatgagccaccatgcccgggccaaattggaatttagcacccacatttatcttaactcagtagttcctaagtaaaagagatttgtaaggccaggcgcggtggctcacgcctgtaatcccagcactttgggaagccgaggcgggcggatcacgcaggagatcaagaacatcctagctaacatggtgaaaccccgtctctactaaaattacaaaaaaattagccgggcttggtggcatgcgcctgtagtcccagctactcaggaggctgaggcaggagaatcgcttgaatccgggaggcggagtttgcagtgagccgagatcgcagttcacaccaccgcactccagcctgagcgatagagcgacactccgtctcaaaaaattaaataaataaataaataaataagtatttgtttgtatgtcaatctaggaacaattcacagccgtctctactttgaaccacccaaaaggctgatttatgtgaatttaatttcacttgacaattaattaaactcctctgcatatcctgccttttgttttgtttcttgttttgtttgtttactaagagactgcaatctgcttgtagttcacccctgctcaagcaagacatacattcagttttgttttttcagttgtgagtaaatacctcttttcctcagcaatatgtgggtcctgtgagtttcttagagggccctggctcattttgctgatagggttgccaaactcttagtgtgataatagtgcattctttgaccactttgtttctaaattctggccatccttcaaaactatgagctcgagcgagtgtcccaaccacatgagttccaggttgttgtaattgagcctttatcagtacattttgatgaaagcttttcctattaggatttggatttgtgaccttcagatttttgtggaaatttattaacaatgtttgactctcgagttttgagagcccaaagaaagtttttgatagaaactttcttttcttggtgatatactctccttgattgtgacttcttcctcttcttcctctttttgttcttttctttctccttcaccttctcctcctcgttctcctccttgtttctgcttttgttaaccaaggtctggaaagattttacttttctgtttactgttttatttaagcttgtgttgagagtaataaggaaatcgtagaaatcagagagaatggcataggccctgtaagtcaccatcatctttaatgcggatgttaaccagtacaagaaccccgttagagttgcatttgctttctagggcaagatctttgctctaagtttttttaaacacatggctgtctatctttaaaaaaacaaatcatttttattttatagagtataattgtcgaacagtcttagctttacagaaaaatttagaagatattagagttcccatataccctgcacccaatacccctactattatgatagtccttactattaagatggtacttttctgccgcgcgcgatgactcacgcctgtaatcccagcactttgggacgtcaaggcgggcagatcacctgaggtcaggagttcgagaccagcctggccaatatggtgaaaccccttctctaccaacaatacaaaaatcagccaggcatggtggcgggcacctgtaatcctagctactcgggaggctgaggcaggagaatagcttgaaccctggaggtggagattgcaatgagcagagattgtgccactgcactccagccagggcgacaaagtgagactcaaaaataaataaataaataaataaaatgccgggcacggtggttcacgcctgtaatcccagcactttgggaggccgaggcgggcggatcacctgaggtcaggagtttgagaccaacctggccaacatgatgaaacctcgtctctactaaaaaaacacaaaaattagccgggcgtgatggcgggcgcctgtaatcccagctactcgggaggctgaggcaggagaatcgctttacccggagaggcggagttttcagtgagccgagatcgtgccactgcactcctgcctgggtgacagagcgagactccgtctcaaaaaaaaaaaaaaaaaaaaaaaaaaaaaaaaaaaaagaaaagggtgattttgtgttgtgtttgttaaattcatgaaacaagtaggacaagaccataaattgaaaaaccaagcccattccaaattacgaatgcctccggtagtacctatgccagggacaaagtgcactttaatagtcaatacacaggttgcttaccgggttcttgttttttttgtcaatagtcttctttcatttcaagttcccaaagtcttgggaacaagccggtttttttttttttaactggcttgcagaaagctcaaggagatgtgcagaaagtaaagatatttcctgacaatagtaagaacacgaccacgaagggactcgaaccctcaatcttctgatccggaatcagacgccttatccattaggccacgcggccgcacgcgggtgctaatttgcacacatcaagactgaagtgtagtgaggaaacgttgagtttctgttttcaaacctttaacttcgtaattagagatttaacaacttgaaggggggcggggagaggcgggggaggaggtgggcagaaggaataaaactccatctaaaattcctaatagcaattccttagaattataaactgcgagatgatcagaagtgacatctttgccttctttgaaggctctcttctctaagttactaataatgataatgcacgttcgggtacagaaatatgagccaagaactcaagtctgcaatgaaggagtggacatgacagcgtaagagggagcatcattgtttgatctattttaaccttttccgtctcaaagatacgatggtgcttcctccaggaagaaaagcctgtaagctcaaacaagagctcccctggaacagaagacactggagaccgtaagaggtgggaggttggaagggggaaaaggatagaaaaactgcctgttgggtattatgctcaccacatgggtgacgggttcaatcgtactccagacatcagcaacacgcaatacacccttgtcccaaacctgcactgtactccctgaatctaaaataaaagttgaaattaaaaaaaaaaaaaaagctcccccttgtcagaaaagccccaagtattttgcctaaaggttgattgctctaagctcacctttggattgatccagaaaacagtctggggcgattttttgttaccctttccccagctatgtcccctatgttgatagggtaggaaagattaaaaaaaaaaacaacaaccaagtttgtaaagtaaaccaatcacagattccctcagttttcgcatcgtcttggcttcatggaaatgacgagttactgggaagaaactatttcatttttccagtgcccagtcctatctcctttccccagagagatgcatctctcagccctaaacttttcctggatcccttgtacaccattttctccaggtttctccagtcaaaactcaagaattgttttaggccatattttggatggtgtatcctatgtacactaatttattaagtaatgacccatgtttgagaccacggaacgctagttctggggccggactagatgagtctgggtagacaaaagaaaggtcttctgctgttccctatgaaactgatttagttaagtccctttctttctcagaaagcgtcctatgaggagcattagattgaataagggtttctggtgtgatccagtttggggaggctacttgctctagtcagtgctgaagaatccatctccattttgggcaagatgcactaccatgacttatgtttcaacagactcaaacttattcacatgttttgaaattgttctcagttttgcttcctcaccttctcactagtggattttgtgcccaaagaatagcaatccaaaatctcaaaatctaacaaatttaaataaaagggcattttttgttcagtctggaggaggaaaagttaactggcagacgtaggcagcagatagtaaagttggcacagttagtaaggttggtagactgagccaaaccatcgaaatctatttatttattgttatatttatttatttatttatttattcctgctgtttgcagagcaggggtaccctatagaaagtgtgtccaaagtagcctgaaatttctttcttcaggaagatgctaaaaaggattggcactgagatttgaaagaataatgctaagaaactattaaattgtatgaaatgtttgtttataccagtgataccatttcctttccaaagcctttcagtgttttctctgatgccttttgatttttatctgatgggttccaggcaagattcctttaaaatgtttaaatatttctaacaaaagtattttgggaggaatccaagagagatttgaaagtatgacattcttaatctctctataacaatctgtctagataatttcactgaagaaatgaatggaggagggtgtctgtagataaaggtttctataattgagatttgaaaaaaatagaatttatttatttgtttagatgaaaccagacaactttccaagccctgaatcaaattgggggatgtattgcacctttagacaaagaatctcccaatgtagctactttagccattttacaaaaacccataatgcatgaccctaataatgttcttaactttagaatttggaaaactcagcatttcctgtgaggtgtgatccagtgtacaacaaacgttcactcacacacacagaaagaactaagatttgcagcacttatggtctggttattgacctgacgtgtgtgtgtgtgtgtgtgtgtgtgtgtgtgtgtgtgtgtgtgtgtgtgtatgtgtgtgtgtgttggggatgggggctactgtgaaaggaaaggataaagaaaactcagccaagtaaagattttctactcacatatctatttaccattcttttgtctatatgtcttttaaaagaagacatacaaatggcaaatatatgaaaaggtgctcaacaccattgatcatcaaataaatgcaaatcaaaactaaaatgaaatgttatctcacccaagttaaaatgactttcatccaaaagacaggcaaggacgtggagaaaggagaaccctagtacactcttggtgggaatttaaattagtacaaccgctttggagaatagtatggaggttcctcagaaaactaaaaatattaccatatattccagcaatccccctattaggcctatacccaaaagaaaggaaattagtatatcgaaaagatatctacactgtcatctttattgcagcactattcacaatagccaagattgggaagcatcctaagtacccatcaacagataaatgaataaagtaaatgtggtacgtatacacaacggggtactattcggccatgaaaagaatgaggtcttgtcatttgcaaagcggatggaactatgttctgtgcgggaaatgcgagaggggagaagaaaagacacacacacaatacctttaagggtaaataacctttatcccacgtaaacggcaatgcagatataataaacaaatgatacaataagcaaattgcaatgggaaggggagaagggaaaagatatatatatatatatatatacacacactcaccaaatatatatatatatatataaatatatatatttatatatatgtacactcacaagactatgaaggattcatcaccacaccgggaagcaacagccccggctccagagtcggccactcgtccatgcacagagaaggagaggtctcatgaagctcacgagagcccttcgcgactgagctcaaggaacaagaaaaggtcaacttgtttttgcgattgtctgttgtttttcaataactaacgtataggaatagattgaaatagagatttctccaaaacagcactggatgaacacctcaaggggttcatacaacctgttcaggatttggtgaccattgtttgtgtccacgttcaattgagttcaaatttaatacgtaacttttcctccacaaactagaggacattaagttaagctatacacagaaagtaaaacttcacatattctctctcatttgtggaagccaaaaataaaacaattgaactcatggagacagagagtagaatgatggttaccagatgctgggaagggtattggagggggcagtgagatggttaatggatacaaaaatatagttagcatgaataagatctatcatttgatagcacaacagggtgattatagtcaacaaaaatgtattgtacatttaaaaataacttaaagattataactggaatgtctgtaacaaagaaatgataaggtgttgaggcgatggatgaggtgatggatgcttcgtttatcccaatatgattattacacattgtatgcctgcatcaaaatatcccatgtatcatatatatacatatatatactatgcagcagtaaaaattaaaaattaaaaaaaagatccatagacgaagaaaaaatatcttcaaaaataaaacaagaaaaaaacaaagaaaagatccattattaattactgcctttgtctgtctgtgtttggagaacgaatatctggcagaaaaatgcttgctgtgtttaacatcactatttctaaaacctttagactgtgaccagcaaaagcggcactaaatactaaaccaaaagacactgttacacgcggttttcctctctggccagccagaccgccggtctgaggtccacttgccaaagtgatgcctggctggcagtttcatccaccaacagaaaggggtccattatggaatgttctcttgcatcttcaaattcttcctccttcgtctctcttaccctctgcctacaaaggcttcaagaaagagatgcaagacaatactgagggatacgaacaaaagtagctccacagttgcctcgagaagtttaggttgcaggtaattggcgagaatgaaaccctctgtatctagcaactccgcagtgctttgtgtagaagacgctccatctcaggttacgaaaatctacagaaaggaaatgtttaaaaagagaaaaggaaaatattcctagggattataatgtctctcttaagcagggtcttcgaaaagaggataattcaagtaatatgatttacaaattgcaacatgaaacaaaatgaactgaacaaatggagaaatctagattacatactccgtgggttgcgtctacccagggcctggatagctcagttggtagaacatcagacttttaatctgacggtgcagggttcaagtccctgttcaggcgaaatatttgtgtgttttactctagctccggagtccccaacctccagtaaacgtaaccgcgtatcaggcagcgcggcaggcgagccagagaagtttcatctgtccttatacagcaactccccaacgctcctgcgaccgcctgagctactcttcctcccagataagcgggggcgtcagattctcacagaagtccaaaccctattgtgaactgcgtatgaaagggatctagattgtgggctccttatgagaatctaatgcttgataatccgtcactgttttccatcagtgccagatgggactgtctagttgcaggaaaacaaactcaaggcttccagtgattctacattatggtgagttggatacttatttcattatatattacaatataataacaatattaaaaaagtgcacaataaatctaatgtgcttgaatcatcccaaaatcatcccccccaacccctgctccctcatccatggaaaaaactgtctttcatgaaacggtctctggtgccaaaaaggtggggaactgccgcccaagatagtttataccaattaagcacaggaagaagttcagatacttgtttgtacagtgactaaaactttgctactttatgctttacaaatgtggaatgatttacatcatgaaattaccagccctaagggattgccttagtgaagttgttttccaaacaccagaatacagaaatctaaactattttagagactgttgacctggagatttgcatttttacatattttttagagaatctccttcaacggttaactgaaaacaaaatcaatcaaaatttctaaactctaaaaacagagaaagagatattgaaagcaagaaaagagacaaaacaccttacctacagagaaaaccaatttgcataacagtgggtatcttatcagaaatcacagaagtcagaaagagtggcacaacagttttcaaggaccgaaagaaaagaattgttaattctgaattctatatccacagaaaatatcctttagaactgaagaagaaatcaagacattttcagagcaaagaaaactaagataattagcttctagcagaattatcctttaaaaaatagttaaatttctccagatggaaagaaatgataaaagaagaaataattgacaccaggaaagaagaaagaacatggtaagcaaaaaaaaaaaaggtaaaaacaatacattttccttttcctcttgagctttctaaattatgtttaacagttgaagcaaaaagtgtaacatgaccgggcacggtggctcaggcatgtaatcctaccactttgggaggccaaggtgggcagatcatgagatgaggagatcaagaccagcctgactaacatggtgaaaccccgtctctactaaaaatacaaaaaattagctgggcatggtggcacacacctgtagtcccagctactcgagaggctgaggagggagaatcacttgaaccagggaaacggaggttgcagcgagccaagatcacgccactacactcaggcctgggcaacagagtgagacaatgtctcaaaaaaaaaaaaaaaaaaaaagaaagaaagaaaaaagtataacatggttcgatgtggttcgaaatgtatgtagaagaaataatttaagacaattatattacaagtaggagaggcaaagtgacaaaaaggtaaagatgacacacatcactttaactgataaaataatgataccagtacacagtgataaattaaataaatatgtaatactcagacaaatcactaaaagagttatataaagagatcatttaaaaacactacagataggctgggcacagtggctcacacctgtaatgccagcactttgggaggctgagggggatcacctgtggtcaggaattcgagaccagcctggccaacatggtgaaaccctgtctctactaaaactacaaaaattagctgggcatggtggcgcatgcctgtaatcccagctacttgggaggctgaggcaggagaaaaaaaaaatcaaaaaaacaaaaccacacacacacaaaaacgctacagataaatgacaatgaaattctaaaaaagtatactagtagtccacaaagaaggctttaataaataaatacatacatacatacatatccccagaaaatggcagtaacagggtacaaatagaaaacaaactgctagatttcagccctaacatatcaataattacattaaatgtaaatggtcgaaaggtaccaattaaaagacagagattaacagagtagattagaaaatataatccaactacatgctgtctacaagaaacttatttcaaatataattatacatacaggttgaaattaagcatataaaaatatataacattcaaatgttaattaaaagaaagcaaaagtgagtatattaatataatatgaactttatttatttatcttttttctttgagatggagtttcactcttgtcactcagactggagtgcaatggcgcgatctctgctcactgcaacctctgcctccagggttccagtgattctcttgcctcagcctcccaagcagctggaattacaggcacgtaccaccatgactggctaatttttgtatttttagtagagatggggtttcactatgttggtcaggctggtctcaaactcctgacctcaggtgatctacccacctcagcatcccacggtgctgggattacaggcgtgagctaccacgtctggcctaatataagctttagaacaaagaaaaattttaaaaatccaccaagaaggcataacaatcctaaatatgtataaaccaaacagagttgaaaatatgtaaagaaaaaaagaatttttaaaaaatagacaaatccacaattacattagagacttcaacacttctctcataataatcgatagaacaactaaacagaaaatcagcaaggatgttgaagaactcaaaatcatcttcagctaacagaattcagtcaacatttaaagaagactccacacaagaaaagcagaacacacagaacacaggtcaagatggaacatattctgggccataaaacaaacctcaaatttaaaagaattaactcacacagtatgatccctgaccacaatgaaatcaaactaaaagtcaatcacagaaagacaacagaagaacatccaaacacttggaaaatgaacaacacactactaaatagtacacaggacaaagagaaagacttagtagatatcaaaaaataaattaacctgaataaaaatgaaagcacaatataccaaaattttcaagacaacctaaaaaaacactgagagagaaatgtataccactaactgcatacattagaaaaagaaaaaagtctcaagtcagtcatctaaacttttatttgaagaacccaggtggggaaaaaagcaaaataaacccaaagcaaatagacaaaagataacaataaaaataagaacaaaattcagtgaaacggaacacaaacaaaaaaagaaaaacaaacaaaaagctagttcctttagatcaataaaagaagacctctagtaagacagaaattttaggaagagagatgacacaaattaccaatatcaggaataaaaagaggatatcactgtagactctgctgacatcaaaaggatatgtttttggatgatttcctttaaaaaatttagccgggctcggtggctcacacctgtaatcccagcatttaaaaaataactagccatgcatggtggcgggtgcctgtaatcccagctactcgggagacaggtaggagaatcgcttgaaccgggaggtggagggtgcaatgggccgagatagcaccatttcactccagcctgggcaacaagagcgaaactccgtcgcagactttttctcccccttgtaaggtcggagcgttcccactcaggaaacaacatttctctactctaggtttatctggcctcgcatctctccccagctgggcccagcctcagcctatgctgcagaaatgtttaaagtcaagcatgtagagaaggaaaaaaaaaaaggaaagtgatgtggaaattaaaatagcagctgcataggaatctcaacatagtgcttaaaatgtgcataaacgagactaggagtgccctgcgcttttgtgaaaacttcatttagaaataaatgagaaagaaggtggagaggagccgagaaccagcaggtggggaaagggaagaggcaggctagagttaaaaaatgaaggaggaaaagcatcctcaagattattcagaatatatatatatataatatacatagtatatactaataatatataaggatatattatatcctaataatataagtaaataataatatataacttgttaaataatcatataaataaatatattttataattatgttatttattatataatattaacataacatattatcaatataatattttatataacatatgtagtatgatatatcctaatatataaaaataatattaggataagggaatactattgtggtggtaaactgaggaacggaaagactgatacaggagaacaggaggatatttattttaaggtaagcagccactgagtggattcacatccaaaaagttgagcactggccgggcctggtggctcacgcccataatcccagcactttgagaggccaaggctggcagattacctgaggtcaggagttcgagaccagcctggccaacgtggtgaaaccccgtctctactaaaaatacaaaaattagccaggcgtggttgcacatgcttgtaatcccagctactcgggaggctgaggcagaattgcttgagcccaggaggcggaggtgacattgagccaatatcgtgccactgcactccagcctggccgacagagcaagactctgtctcaaaacaaaacaaacaaacaaaaaatgctgagcgttgaacaaagacagagcaggagtttttataagcaaaacaaaggcagttaatcatacagtgcttaatttgtggccttgcagctgcgtcaaaagaaaaacaagaactgactaaatacagacatttgtaaaaacagttatgcttaagaagccagggaaaggagtaacagtataggaatttgcctttcctttttttcccttcaaccttgttcttgggtggggtgggagaagggcgtgtctggaagccgttcctttggccttggcttttcggaaagtgttatcttgtaactgtccttgaagtgagctgctaggcaaacgaaaacttgtttcttttctttttaaccctttcctgttacttttcttggagtgaatgaatgcatatttatttttaaatttctgccttactatgaataactctttacacacaaacttgacaatttagatgagatagactaattccttgaaaaacacaaattaacacaactaactcaatatgtaatacattttttataaccctgtaactattaagggaattaaatttgtaacataatttaaaaaaaaaatcaagaatctggccgggcgtggtggctcatggctgtaatcccagcactttgggaggccaaggcgggctgatcacctgaggtcagaagttcgagaccagcctggctaacatgctgaaaccccgtctctactaaagatacaaaaattagccggatgtggtggcaggcacctgtaatcccagctacttgggaggctgaggcaggagaatcgtttgaacctgggaggcagaggttgcagtgagccaagatcgcaccattgcactccagcctggaggccaagagcaagacttcgtttaaaaaaaaaaaatcaggaatcttcgaatccaagaaaatttcactgaagaattctaagaagttcttaaggaggccaggggcggtggctcatgcctgtaatcccagcactttgggaggccgaggtgggcgaatcatgaggtcagaagaccgagaccatcctggctaacacggtgaaaccccgtctctactgaaaaaacaaaaaattagctgggcgtggtggcagggagcctgtagtcccaactactcgctggagaatggcgtgaacccgggaggcggagcttgcagtgacactccaacctgggcgacagagcgcgactccgtctcaaaaaaaaaaaaaaatggttaaagaattaaaacaaggtctacacaatctattctgaaaaaaacagaagaggacaaaaaactttccatttatttatgaagttaatagtatcctgatgctaaaaccaggtaaatacagtacaaaataatgagtattggtgcataaatacttaccaaaatattatcaaatagaattcaggaatatataagaagcattatacaccatgatcaagtggggtttattccagagacgtaagactaggtaaatttagaaacaatcactgcaatccaccatattaacaggctaaaaaataaaatcacgtgatcatatcacagtagaaaaagaatttgtcaaacttcaatagctactcatgacaaaaagtctcagaaaaataggaatagagaacagctaacactgtacatcacggtaaaagacagaatgtgtattagtccgttttcacactgctatgaagacactacctgagactgggtaatttttttttttttttaagatggagtcttgctctgtcgcccaggctggagggcagtggcctcctctcggctcatttcaacctccgcctcctgggttcaagcaattcttctgcctcagtctcccgagtggctgggactacaggcgcaggccaccatgcccggctaatttttgtatttttagtagagacagggtttcaccgtattggtcaggctggtctggaactcctgaactcatgatccgcccgcctctgcctcccaaagtgctgggattcccggcgtgagccactgtgtctgggtaattgataaaggaaataggtttaattgagtcacatagctgaggaggcttcgggaaacttacaatcatggcggaagggaaatgggaagcaaggaccttctttacatgacagcagaagaaagaagtatgagcaaaagaggaacttgccaaacacttatgaaaccatcagatctcatgagaactcactcactatcaccagaacagcatgggggaagccacccccatgatccaactacctcccaccaggtttctcccacaaagtcaaaggaattagaataattatttaaaatctaggagggaaaaacagtctacctgatttcaagactatttcattacattgttgtattcttgtattattgtattattactacagtaattaagactgtatagtattggcaaggagataggcacgtggttaatagagagaatggaaaaataaacctacacaaatattctcaactggtttttgacaaagttgcctaagtagtaattccatggaagaaaaataagtctcatgccttcacaaaagtgaacttaaaatggatcgcagatatgaatataaaatgtaaaactataaaactttgaggaaaatatatggaagataatatttccaatctagggctagacaaataattttacagttgacagtgaaacatgatccagagatcttgtaaaagctggttcttttttcctcctttcctctcctgctatgtcagttgctttggctggtacagaggctgaccaaatagaaatagaaataagagagcagtaaaggcaatgaattgggtcatgtttttactttttatgtgacaaagaaatgacagaattggtggccaggtgcagtggctcatgcctgtaatcccagcactttgggaggccaaggagggcagatcacctgaggtcaggaattcaagaccagcctggtcaacatggtgaaaccccacctctactaaaaattagctgggcatggtgacgcgcacctgaaatcccagctacttgggaggctgagtcaggagaatcacctgaacccaggaggcagaggctgcagtgagccaagatcacgccactgcgctccagcctgggtgatagagtgagaccctgtctcaaaaaaaaaagaaaagaaaagaaaagaaagaaatgagagaaaaggaaagaaaaggagaaagagagaaagaaagaaagaaaaagaaagaaagaaagaaagaaagaaagaaagaaagaaagaaagaaagaaagaaagaaagaaaagaaagaaaggaaaaagagaaagaaagagaagggagggtagaatgataagaaaggaaagaaataaagaaaattggctcaaaagagtctcctggctgacaagaactctggtgagttcttctacaggaaaatcagtctcttgtgtgtgactaccaaaatcatctaaaatgttgacggtgtcaaagagataataaatgcatccccacccctgatgtaaggcaaatacaaacctcactggctttcctaggtggtttgagtttttgattgagaataggcagggaaccccgggaacagctcttcctcctcagcaggcgcctggccctggaccaccttcttaaacctctagaacagtgcttctcaaactttagcatcagcggctgggcgggtggctcactccagtaatcccagcactttgggaggccgaggcgggcggatcacggggtcaagagttcgagacaagcctgaccaacatagtgaaaccccgtctcgactaaaaatacaaaaattagctgggcatagcggcgcgcgcctgtaatcccagctacttgggaggttggggcagaagaatcgcttgaacccgggaggcagagattgcagtgagccgaggttgcaccactgcattccagcctgggcgagagggcgagactccgtctcaaaaaacaaaacaaaacaactttaacatcagagtcacttgagggcttattcaaacacaggcggctggacgccaccctcagcaattctgactcaatagatctgaggttgggcctggaatttggcattcctcttgtagcaccctgatccctcaccccttattctcctgtgcagtgtccactgtgactaacatgccactatttgcttaaagtgcctggagagaaccagtggatagaagggaaaacaagtatgaaacgaaaagaaaatgtctgcattaccttccttcaaacaaaaaaaaaaaatgtatcttataacgaacatatggtttgtccctggggcacacaaccagtcttcagctaagcaggtttcactagacaatatctctcctgtaggctggttatggatattttcactgaacaaaagaatcgagaagtaaggacagcctaccctgacagagtgttagactggtggactgatgacaaacatcgtactctgttgcctctcaaagacacttttgattcaacggcaaacatatacacagaggacagcagttttgaaacatgcagcattggaaacccctaaaaggtgtcatcagtagataggatttcctggagttccctcgtcatacaaagcagatgtgataggattgacaaagaaaaaagaattttttttttttaattagaagtgccaacacacctgcaatttactcacctttactttgcatctattttccattgtggcagaaaagctttctctactttttcatatggggcctctgtttgctgttaacagaggtttccaggcaatgttttatgttatgttatattttattttattttgagacggaggttctctcttgctgcccaggttggagtgcaatggtgggatctcagcaaactgcaacctccgcctcccgggttcaaacgattctcctgactcagccttttgagtagctgggattacaggcgtgcgtcaccacgcccggctaattttgtatttttaatagagacggagtttctccatgttagtcaggctggtctcgaactcccgacctcaggtgatcgccccgcctcggccttccaaagtgctgggattacagacgtgagccaccgcgcccggacctcagtgttttattttaacgaggagaatggagtgactgatgcaatacaggaaaatgaatcaatcgtatggactatcagtagggaatgtgttgatccttattgatttcgctccttccgtgttgaagacctctaattccccgacagtcttcgttcggttgtccagcgtcctgccactctcatctcaagcggctggagagccacattttctcagctttggatcgcacttgtggctgtgctctctgcgcagttcgacagggagagaaatcagtggacagatgctttgactctggatttggctcagaaaacaaaaacaacgaccaaaacgaaatgcccggggggcgggggggggcttttctgcctttcttcttctcagcctttccttctctttaatcatagtacaaaaccgaagccaaagtgagccgcctgttgatgtgcacgcttttgtttgctttcaagagaccctgttgcgacctcattcttctttctcctcttccttctgccgtcgcaatcgccttaggtgatgttgaggcttacattatagagatgggagataagtgaaggcaatccattgggttacgtttttactctctatacgtgcagaaataggatagaaaaaggtgaggaggcagaaggctatgttgcttgagaattacatttaagcactgccagagcaaaaccaccatttggaggtgccggggatcgaacccggggcctcacacatgcaaagcatgtgctctaccactgagctacacccccctcctgaaagactgttttgtaataattttcaggaggtaactttcattttctgagactggctccgtgagcatgctggtagtagtggttagtatcatggagcgccttcagctgctctgagtagaagatactcggtactaatgaggggatacagattctttagtatactgtacaggacttgaaatggaaagcaaagtattagaaaagtgtcagataaccgccaaaagaagtttccaatgtggctttaaaacgttgagttgtcaggatctccttcttctgttatgcttggcaaggaatcaaattctggtttttcattctttcgatttctttcagagatgacgcaaagttattgaaattcagctttttcttacctaaaatgcttcatatttgttgtttactcagccggaatattaaaggttagatttgattgaggaaaatcacagtcagaagaaaacctgagagcgatgcactcagcatttcatcttaagggtctttagctggtgtgttgtcctgcgcctgtactcacagctattccagaggctgaagcaggaggatcacttgaccttgggagctggaggctgcagggagctatgatcacgccactgcactccagcttgggtgatggagtgagaccctgtatcaaaatcaaaaagaaaagaaaagaaaaatttataaggtgtgagtgaaacaacacctctagggatgacgagaagagttgaattatgagggtgagataaaaaataagtagaaacaggatttaagaggtacgggggaaagtggtttagaaaaacaaacaggctattgccaaacagaaggaggtgtagaaaaggggagtttttaacaactctttaaggaatgggagaaagattggaagatggagaagataagttagcttggctcatgctaaattcggtgtatctgtggggcacactgtgaggatgttacatggagaactcaggcaattgactctccagcctggggtttgtgagcattagtagtagtagacatattgcatagagggtggataaagactaaaaagggtccttttagatttgggaattacaaacctattcacgatatttgtttaaaagaaaaaaaagccgggtgtggtggctcacgcctgtaatcccagcactttgggaggccaaggcgggtggatcacctgaggttgcaagttcgagaccaggctggccaacatggtgaaaccctgtctctactaaaaatacaaaaattagctgggtgtggtggtgcattcctgtaatcccagcttctcgggaggctgaggcaggagaattgcttgaacctaggaggtggaggttgcagtgagtgagatcatgccattgctctccagcctgggcaacaagagtgaaactctctctcaaataataataataataataataaagtaaaaaaaaattttttttaaagtttgctcctctatgttcttgaaccctggtatttattattatttatcatgattagggctgtgttctttgaactacataagaagatgagaagaaaatccatttcctgacaccaaatttctagtgactgttaactctttctcattctgatttactcatatatgagcctttgccaacactcatgaaataacattgatcccttgtagaactggcagaaaacagcaggttatatggcagacttgtcttttcggttggctgatggaatttctagaacaaaaataggaagcactgaatgctaggtttcactgaataagaaacaagagaagtgttacacacaaaactagtgtttgtgtgtgtgtttgactgtctgtgtgtgcatgtaaatgctagggagataatcttagctctttgatgctgcagaagtaatattaggacaatttgcagaaacactccttcatcattatgtcatgttgcacccagagaaacctggatgtctactggattcttgggaattcatcataatatgaaggtctgcttttttgtttgcctcttgaaaaggagagaattttaaataattaaatatctgtagctctcttctgactaacaacaacacgactgaaacacagttttttttgtaaaaactgtgggatgagcttatttaacacagaattcctctgaggaattaaacatttaatcctgaagacagaacaccctcatgtgatacatactcaattcagaaaacctaaaaatatataaagtatctgtttaaacctgcactgtccaatatggttaccattagccacactggctattgaatgcttgaaattgcccagtccaagttaagagtgttgtaagtgtaaaatacatatcagatttggccaggcacagtagcttgcgtctgtaatcccagtactttgggtggctgaggtgggtggatcacaaggtcaggagttcgagaccagcctgaccaacatggtgaaaccccatctctactaaaaatacaaaaattagcctggcttggtgacacacacctgaaatcccagctacttgggaggctgaggcaggagaattgcttgaacctgggaggctgaggttgcagtgagccgacatcgggccactgcactccagcctgggtgacagagcgagaatccttcgcaaaaaaaaaaaaaaaaaaaaaaatatatatatatgtaaatatatatatacatacacacaccagatttcaaagatgtgtaatactattttttaaatataaaatatctcactaataattttataattgatagcttcttaaaataagtttttggatatacaaagtgatttaaatatattattgaaactggacataaaagatagcaacaacaaacactggggactatggggaggggtgggagggagggcagaaagatttgaaaagctacctcttgggtactatgcctactacctgggtgatgggatcaattgcactcaaaacctcatgcaatttacccagcatcatgtagtatacccatgtaacaaacctgcacgtgtacccccaaatctaaaataaaaattgaaattacataaaaatataaatattgactttttttaatgcaactactgcaaaaggtaacactacaaaatggctgtcatttaaaacttgtattatctcttgattggacagaattgtctaaagacaatgttatccatttaggtgctgttctgggagaatcccagaagcagagaacacggagcatgatctgccagtaattaagtttcatgctgtgagtggacttgacagaatgcatttctatgcatgatctcctttgatctttacaacatcccattttacaaaatcattattaacatcatttttaagccattgaatggcagacaaatcatgcttggaattgccctaggccttccatttcaacagaatgtaaaggaatctttactgcgttaggcacaaaacattcaatgttactgtttgtctagtcaaatatttcttaatggagtaaaacacaagcttctgagttgagaaagcctcagtgaaaggataaagtacctgattcccagtttctgtacagtcaatgtccctaacccaaggttacttctcatttggtactaattttccttttgcaacttgctgcagttctgatagtggagtattgtagattattgtctcctcacagggtatgcagaagttagagaaaaacaacactgaaactgaagcagtaatttgaaagaaaaaaaatcaaaatgaccaaaaaaagacctattatcccaacagagaatttcaagagaggagttgaagtgaaaaagggaaaatggggcacatgcacctgagtcttgactttgctgcccatttgctttcattttcagtattctagagcccctcatgaatgtttgataaaataattcatatagaaatacatatatttcttttttcctggatacaaacatggaaacagcttaagatttggaaattctagacaaggttgccaggctaaagaaatgtcttctcagcaagaaaatttagaatgttcttgtaattgggcctggtgcgatggctcctgcctgtaatccaagcactctgggaggcctacctaggcaggtggattgcttaaacctaggatttaaagaccagcctgggcaacacggtgaaacccacagtctacaaaaaaaatacaaaaaaaaaaaaaaaaaaaaatttagccaggcatggtggtgctcgcctgtagtcccatctactcagggtgctgacatgtggagtcacttcagcctagagaggttgaggctgtagtgagctctgattgtataactgtactccagcctggatgacagagtgagaccctgcttaaaagaaagaaaagaaagaagaaagaaagaaagaaagaaagaaagaagaaagaaagaaagaaagaaagaaagaaagaaagaaagagaaagaaagaaagaaagagaaagaaagaaaaaaaaagttcttacagcactttaataatggagttgactcaagatacaaacccgggtttttctaatttcaaaatgtttcttgcatacaccacacccccatatatatgctcatacagtataatagttacttcactgtatgtttctttttttcatatttcttgtgatttaaaaataaccctcgcccaatacatataaataatatcaaatcaaaaatgacttgtaaatgccacagcatatagcacgttggaatttcttaggttttaaaactaataacttcctaagtttaagactttaaataaggacgggcttagtggctcacgcctgaaatcccagcactttgagaggccgaggcaggtggatcacctgaggtcaggaggtcgagaccaacctgatcaacatggcgaaaccctgtctctactaaaaatacaaaaattagccgggcatggttgcgggggcctgtaatctcagcttacttgggaggctgagatatgagaacagcttgaactcaggaggcggaggttgcagtgagccgagatcgcgccgttgcactccagcctgggcgacggagtgagactccgtccaaaaactttaaataatttatgtaatgagagcacttcatggaagacttcagtggaatatacaaaggagagagtgatacaaacatgtacattacctttatcagactttcaaaaactcccaaaaattggagatatgtaagcttctgggattggcgtataagtgctgtataagggagtgataattaggcagaactcaaaagatgctggctgaaacccagggttgaaccagggaactttaagatcttcagtctaacgctctcccaactgagctatttcagctactctaagcacacacccttagtcatttcttcaaaatataaaaacgtcatttgtagagtgagtgtattttctaatgcctaattctgttttgttcaatatcaatacaaaaattagccaggggtggtggtgcgcgcctgtaatcccagctactagggaggctgaggcaggagaattgcttgaacccgggaggtggcggttgcagtaagccgagatcacgccactgcactccagactgggcgatagagggagattgtctaaaaaaaataaattaaataaataaaataagtgacaggaaaagaaagaaaagaaggatctcttatgtcctccagtacattctatctcttccttagagtttttaaaattgtggtctccacactggtgcataacaactcttttttgttgttgttttcgagacagggtcccgctctgttgcgtgggctggagtgcagtggtgcaatctcggctcgcggcaacttctgcctccccggctcagtggatcctcccacttcaacggagggagagggagtctcgctctgtcgcccaggctggagtacagcggcgcggagtagctgggattacaggcgcgcgccaccacccctggctaatttttgtgttgatattgaacaaaaaagaattaggcattaggaaatacgcccactttacaaatgaagatttttatattttgaagaaattgctaacggcacgtgcttagagtagccaaaattgctcagttgggagagcgttagactgaagatctaaaggtccctggttcgatcccgggtttcaccaggtttgtttggtttttttagttctgcctaattatcactcccttatacaacacttgcacgccaatcccagaagtgtatatatctcaatataaattcttacgttaagtcaaaagtgtaaaaacattgaacttctctggttagacataggaacaaattcagatgtttacagaatttcggaaacaaccctctctggaatgagaaaattgctgaggccgacgatgatttgcaaactgaattttaataaaaccttttctatgtcttaacagttttcaaactcaatctcctgagagtcgaggctttctatttttagccaaaatacggtgggagggtcaattaggatatatttttcaattatttcctcaaaaaaagttttagattctcttacagacttttttctccccttgtaaggtctgagccttctcagacaggaaacaacattcctctactctagttttatccccgccacgcgtctctccccagctgagtgcagcctcagcctatggtgcaaaaatgtttaaagctgagcatacagagaaggaaaagaagaaaaaaaaaatagaaagtgatgtggaaagatctacatatgaatcacaacacagtgtttaaaatgtgcgtaaacgggtctaggagtgcgctgcactattgtgaaaagttcattctgaaagctgggcgcagtggctcatgcctataatctcagaacttcgggaggccgaggcggacggatcacttgagatcagaagttggagactatcctggtgaaaatggtgaaaccccgtccctactaaaaatacaaaaattagccgggcgtggtggggggctcctgtaatctcagctaatcgggagactgaggcaggagaatcgcttgatcccaggaggtggaggttgcagtgaaccgagatcgcgccactgcactgcagcctgggcgacagagcgagactccgtctcaaaaaaacaaaaacaaaaaacaaaaacaaaagcaaacaaaaaacaaaaacaaacaaacaaaaagtaaacgggaggagccgagcgccagcttgcggggagacggaagaggcggggtgccgtgaagtggaggaagcaaaggacaaaagggagagaggtagagggcaaggaaaagcatcctcaagattattagtacttggatagactggatggtagagtgagtctgatcgccacatctctccgtcccttcctctggataggagggaagagaggttcctttttgtccctaggggggtaggctcgaccaggaaggggacctggttcgtttcgcccaggctggcacggcttcaagagcgcctcacctctctttacgttgctggacagaccagttgagctctttgggtatgcacgtaatgtcgcatttttattttcagttcaggaaatgctgatattggagcttctgagggagctgcagtgatttcccgatttcctgcgcgcctgtgtggaaagttagaagcggaatctaccggcagctttgagactaagcatgacggtggaaacagctaattttattagcttttgtctgaaatgcaaaagatgagaaagaaaattcccgtttgtttgctccacatacttctcttagaagcctatggaaagccaactttccccctgaagaaactcctcctggcatttgcaaagagctcctttactcctcttgtccagctcttctctcaaaaggactctgcagagctggacagcggctgcggaaaggcgaagttgttgtacccgagcgagttagagaaatgccacactttgagacgaatttaagagtcctttattagccggcgaccaaaagaggactaacgctcgatattctctcggccccgaggaaggggcttgattttcctttatactttggtttagaaaggggagggggagcttagttgcagcaattctacagaagtaaaagcatgcaaaaaaattaaaaagacaaatggttacaggtaaacaaacagttccaggtgcaggggctctaaatctatcataaggcattaggtatgggggttctgccagacacaaactcaaggctttatggtgttatctcttgagtgaaatcctgggaacttcgtgcattgtttgcttcagtaccttatcagttaattggactctgatatgttgagagtcagcttacacaagttaactgcttgaggaagggggtgggtaaggagtccttgatgttttgtaaatgaaggagccaaatggagttcgtccagctttctcagctaagggacagcctattcatgtggaaataaggctaggtgattaacggagagtctaaaaacaacgttaggtattacattccccacttgtgtttttggggaatcaaatcgttgattcctcagttataataagggggtcatattgagttctaagatacataaatttgacagaagctatgcgttgttttacaaagttaagaaactaatttaatatacacggcctgaaaattaagcttaatagtaggatgaggaggggtccaactaacctagtgactagagtagttagccatggattccagttaaacatgctttgataccaggggatgttattttctctttcttgttggcatctatctagattttctcgaaccttttggagagtatcttttatgactccagactgattggcatagaagcaacaactttctcctagagctgcgcataaacctccttgagagaggaatagtagatctaagcctcagcggttttgaagaactacttcagctagagactctacctgggaatgtaacaaatctacgacagactggaggttacttaaattagcatctacctgttgagatagggccattattccagtttctccttgaactagggctgctgatctggctatgctaaggctggccaagaagggaactaggagcagggcagctagcgaaacctgggatctaactcagggggagaaatgagaagttgtccttctggtccactgtacacgtatacccagggaagtacatgaacttacatgcacaggagaggtcctggttcagttccattaatgcagtgagtgagacttgaagtgcaggccaaccaggtattgttaggcacttggtaagagactgaggtgcttatggaagtaagcagggactgattacaagtagtctgaaagggagaagcagataagttatacccggtactaattagacaagaagcgtttccagacacatcccttagtgtgagggcacagggtcgtgcacgacaagataaagggccacttttaagtgtggcctctactcctaagcctacataataagggggttttgcttttagacatagccaacaatcttgggctagtttaggctgggtgaggttaagaaggtgatgtaccctgcctagtatggacatcaggctgtgttgaagatattgttgctgcagctggggtttaggaactaggaatggtggcggaacagttaaatcgaccttgtcagggtgtttttggaacatagggtcgcctagatcagttaaaggcctgattggcttgggtgggctccatgagaccaggattttcttctggatggcgaacatagtcttaacatcaaatcctgggatataaagccttaatccttatgacatgccataataccatcgagctgaattagggtcatggacagttatagtaagaggattacaattttttctagtacacaatctaggatgggaagcacgacttatggaaagagttgaagatccggttgatctcccagagttaagtgtctaaagttacacgtgtccaatcagggcagaaaaactggtaaatatctcaacagctagagtcagggtgatttccaggacagaggtaaaagtcaacattctgaagtcctttttccgcacctttggagctcccacatccagtctggctcccggagtgtccaaatcctgccaaaaggtcaacgcttcctgcccccttgactgtcagattgtgttactctttgtaggtacgggctggttctgggaacagtgcacataaatcaactgcaaaggagacttccttggaggttcctgccctccaagtactgtttgcgaatatacgtcttgtcatgaaataggtgagaagaagggaataggaaggtgcagaggacatgacaggcaaaaaccaaaaagagaagtaaataaaaagaattaatctaatggcttcacccgacttaggcacagttttaaggggcctgacccaggcttggggacctatgtttcttgctgggctttgttggcctttttgatgcgggagtgacgaatccaagcaggaatgccatccaccttcagagctgttggcatggtgaggatgacagtatgaggtcctatgtaagcaggagtgagtccttctctctggaactttttaacaaacaccaggtcacctggctggaatgagtggcagggccccatctggtcaggaaccggattgggatgggctcctcggaaaagtggctggatgatatcttgtacctgttggagagactttagctactgtaataaattagcttgtgatatttctgccaaattggtatcccttagcttaggcaagataggtggagccttcctatacatgatttcaaaatgtgaaaacctagcccagtaaggagtgcaccttactctaagaaaggctaaaggaaggagccttactcagttctcaccggtctctaagattaactttgtaagagtgctttttagggtgcggttcatgcgttctacctgcccagagctctggggtcgataggcacaatggagcttccattgaatgtgtaatgccttactgactgactgagctatggacgaggtgaaggccagtccgttatcagaccctatggcagcaggcagcccatgtcgagggatgatttcattgagtaaaaacctaactaccatggtggcagtctcattcttggtggcaaatgcctcagtccatacggagaaggtgtctactagtactagaaggtatttgtacctagcccggtgtggttttatttctgtaaagtcaacttcccacctttctcctggcaagtttcctcaaagacggtggcctgggctgggtttagcaccttgcttggcgtttacctgggcacaagttgtacaccggagagctgcttgatctgctaagctttgaagatagggaatcttaaaatggctctagaggagccgggccagttttgctcctcctaaatgggtggtagaatgcaggcgactgattaaagtttccccgagagagctcggggtatgaagattctggagtcaggaagaatccaccaaccttcctgatttttattggccctgagatctgaagctagttttttttcttccgttgagtacgcgggattgtagggcagatctggctgtggaaaggagactgtgggtaataagtttagaggcatgactggaagtctggctgcatcccgggccgctgagtcagctttctggttaccacgggcaatggccgtgttttctcctggatgtcctttgcagtggattacagccacctgctgagggagccatacggcttcaagcagggctagaatttcttctttgtttttgatagtctttcctgctgaggtgcccacgctcctgatagatggctccatgtacatgtacagtagttaaagcatacctgctgtcagtgtaaatgttaataagtttatccttaccccatcggagagcctgagtgagggcgatcaattcagctttttgtgccgaggtatttgccggtaaagcctgggcccatagcacatctgtctttgtagtaatggctgcaccagcctttcgtactccctgttttgagaaagctgctaccgcctgtaaacatggcggcgtccaccttctttaggggcacatcttggagatcaggtgggccagtttctgtagtttctaacagttcctggcagtcatggacaggtgtagtgaagtctggatcagggagtaaagtagctggatttaaacaccttctgggagagaaagtcaaacgaggctgatctaacagtaaactctgatactgcaggatgcgagcatttgacatccatttgccagaagcacttcgtaataaagtctctacggcatgaggagcggtaaaggttaaattttgacctagagttaacttatcagcctcttagactaggcttgctgttgccactatgactcgcagacaagttggccatccagaggccacaggatccagcctcttagacaaataggccactgggcatctccagggtcctaaagtctgagtaagcacccccttagcaactccctggctttcgtggacaaacaggtgaaacggctctgggatatttgggagggctggagcaggggcttcagttaatgcctttttcagattttgaaaagcctgttcttctgtgtccatctaaactagccggctattccctcctgtagcagtgtacaggggcttcgcaatctccgcgaaccccgacatccataggcgacagtatcctacggcccccaggaattcacgtacctgtctcttggtggtgggagtggggattcgtaggatggcttctttccgggcactggtgagtgccctttttccttggcttatgtcgtatcctaggtaggacactgtgggaagacaaagctggaccttcttggctgagactcgatacccgagctcctgaaggaggtaaagtaggtccctagtatgttgcaggcaactgtctttagtttcagtagctaataaaaggttgtccacctactgaagaagagtacagttaaggtgactagcttggaatggtataggatcctgctggagggcctctccaaaaagggtgggggaatttttaaaaccttgaggtaactgagtccaagtcaattgggtagtgtctcctgagctaggatctgtccattcaaaagcaaagatcagttggctcttgggggccagagaaatagcaaggaaggcatcctttaggtcaaggacagtgtatatactgtaagttctggcgggagcaggttgagtagagtataaggattggggacagttggatggacagtaacagtctgtttgttaacttcccttaagtcctgtaccggctggtaatcattcgttccgggtttctggaccggcaaaaatggaatattccaggcggactgacacggtgtgagtatgccagcttgtaacagtcattgaatatggggattaatctcctgtctagcctgctgactcataggatattgctttacctggacaggcaaggcagtggccaggagttctacaaccactggtggatggtgtttagccagtcctggggggtttgactggcccaaactctgggaaagagtgtctgtaagtccaacaggagaggattagtattattttccagtggttgtgatggtgacactaaaagattttcctctgacagaggggtagttagcaggagttgggcagtggggggcgctgtatttcctagcatgacgttagcctgctgggctgagaaggagatagaggcctgtaacttatggagcagatctcctccgaggagaggaaaaggacactctggaaccacaagaaatgactgtctcactcttttctgtcccaagctcacttctcgtgagtgtgtgacaggatattcctgaatagctccagtagacctttgtacagccactcttttattagagacactgcccaagggggtctgtagtaccgagtgctccgccccggtagctactaggaagcgtacaggctggcccctcactgtagcggtcaccgtgggctcctgggggccaagagagagggagtcctggctccatcagtcatcagactcttccgttgcggggagggtgagggcctttttcttttctgatttttcctctggccgtagtgggcattcctttttccagtgcccagtctgcttgcaataagcacatttgtccttttctaggggagcctgttctcctcttttgcccttctggtagggacctgaggttccctggctattcctctgtgatgggggccttcccttcttgacctctccgatggccgcagctaagatttttgcttgtcttttgtatgctttatcagctgctgcctgtgctgtttgttttcttttttcaaactctcgattgtcaaaaactttttgggctatctctaaaagctgagtgatattcatcccaggaaatccctccagtttttggagttttcttttaatatcaggggctgcctgagccacaaatgccaaattaagagcacggctattttcgggagccgccgggtcaaaagaggtgtaagtccgataggcctcctggaggcgttctaaaaacgctcccggtgactcatcaggccctgtgcgacttcagtcatcttagacaagtttatgggtttctgagcagctcctttgatacctgcaaggagataccggtgaaaatcgtccaaagctttcttcctacccgaggaattcgtgtgccagttaggccgggtagagggaaagacctcctcaagaaagtctctagcttcctcctctggcctattggctgatgtgaggaaatactttctggcctctcttcggatatgttccctctcttcagaggtaaaaagggtcaaaaggagctgctgacagtcatcccaggtgggccgatgggtccggagcacagactccatcagtgagatcaagacctggggcttttcagagaagggaggattatgagccttccagttacagaggtcagaaggagaaaaagggacataaaccaagaatggggctgagcgctcatcacccggagggacttgtgcttctttccgcggtagagggggggctacttcctcctgccgcggccgcaatcgagaggcaataggcggcgagcctacaggggatgtagtcgaggagacaagggaagattctaagggagcaggacggttataaggcggcggaactgagtgggggagactctcctcttcttcagagggaggcagtacagggtgagccgaacagactgagggtccaggcggaagtgcggtctggctcaaaacgaccttggaggcagaattatgaatggcgcatgagcggagccatggtggggagcttctgaccaaactcagccattgatcaatgtggggaaactgatcggggtggccgggagttccagcaacaacccgccacacagcctgaacaattgctaggttcagtgaccctactgggggccatccgactccaaactttggccattctacttcgcagagtgtccggagtttgcctttttaaaggcggaccccataatcctctgagaagcctagagaaaaattctgcagcatacattggagggggctccaatccttacagggccgggaagaggagtttcccatttttggaggcagtttgacaaggtttgagcagggatatcaaacccagcacggacagaaaaactcattccctagggggctggagtatcggaagaacagaattaacataaccagaaggagccgaaagacaacaatagctcacactacttgccacaggacggttaactagctttaagattgagggaggtcgggcgcagtggctcacgcctgtaatcccagcactttgggaggctgaggcgggcgaatcacgaggtcaggagatcgagaccatcctggctaacacggtgaaaccccgtctctactaaaaatacaaaaaattagctgggtgtggtgacgggtgtctgtagtcccagctacttgggaggctgaggcagaagagtggcctgaacctgggaggcggagcttgcagtgagctgagatcgcgccactgcactccagcctgggcgacagagaagactgtctcaaaaaaaaaaagaataattatccaagattgagggaggaggactagaggccaaccttaggtctccttggctggatggacctaggcgtcctccctctttccctggacctgtagcctaaatacttttggtgtctccacgactcaaaggcaaatagctcaaattcggccttttcttttaagagtttgaggagtgagagcagagccaagtcctggagacgctgaacttgctgtgacacgggaaaacgagatgtacggggtaagtggtagggatgaggaggaaaaagggccactcggatctttcctagggtaggagagtagccacagaggaatagaataagggtttaaacgaagtaaagtggtacgggcgtaggtttctctgcacagtgccgtatttaagggcacagaaaaagttacgggatgacaaaagaggtgagcaaggaggtctgcagggtggctattttgaacctaccaccggtttagtctggaggtggcccagtcacttggacatggggtatgacaatctaaatgccagcaatcttcatggtgccagaaatcccaaacaggcgaatgttcctcacactcgttcccgttcccgtaacaacacctgatttgtttctgacagaaaaggcaggactgggatggccagcctaagcgattgatgagaaatttaacctcctgtgataaaaaatcaacactaaagaccttgaagaagttcctgcccagacgtcttgggcagtatcgatgacctgacatacgaaactttgacaaccactaaacaggacaatagacaccgagcaggacaacaaacacaaaacaaacaatagacccttgggtatataaacaattatggtaggtttttattagacagacaaggggagggggtcccatgatgggatcagtcagatgcctgcctggccgctccccctgaggggacttgggcttctcttagcattggcaggcaggtataaacccccggctcggatggagctatgcccgatgctgccttaagccttatgaggtcgccacggaacggcaggtgagggcccactcgaactccgtagctttcgccgtggagctacaaactggggatccagaggcaggcccctggactcctcagtcgtgcacacattcacaaagagtttataacaatttttgttatttcccgttctaaacaaaggtcccagaagacctgaacgagaggaggagaagagatagagcaagggggagagaaagaaaaagaggaggagagagtgagagactagtcttaatggagaggccggcctgccagaaaccagggctctatcctccagcgtcctggagtatggatagagtcaaagagagggacaccgtcgtcagggctgcctccctctcaccaaaccagaaccaaaaggcgcctaacagaaaaaccagggctctgtcctccagcgccctggaaaagcgggcagtgtcaaagacagggatgccctcgtcagggctgcctccctctcaccaaacagaagtcaaatctaacttacctgaccccggggtcagaagctgaggactcagaggttgaattttgtgggcacacacacacggtagtcgatccgctgtcctccggaagacggtcgcctttcggggacctggaaaattttttttcaggtggctcctcgcctataagccggccgtccctccgggggagcccggagctagcccggctctcgcccagtggcgaatatatctcgctggggcttccaaatgttgtacccgagcgagttagagaaacgccacacttcgagacgaatttaagagtccttcattagccggcgaccgacagacgactaacgctcgaaattctctcggccccgaggaaggggcttgattttcctttatactttggtttagaaaggggagggggagcttagttgcagcaattctacagaagtaaaagcatgcaaaaaaattaaaaagacaaatggttacaaggaaacaaacagttccaggtgcaggggctctaaatctatcataaggcgttaggtatgggggctctcccggacacaaactcaaagctttatggtgttatctcttgagcgaaatcctggtaacttcgtaaattgcttgcttcagtaccttatcagttaattggactctttgatatgtaagagtcagcttacacaagttaactgcttgaggaagggggtgggtaaggagtctttgacgtcttgtaaatgaaggagccaaaaggagtacttccggctttctcagctaaggaagagcctattcatgtggaaacaaggctaggcgattaagggagagtctaaaaacaaggttaggtactacaaagtcgcggtaaaatcggtgttaactacgtgtgcagccaccttttccttagtgctattcctgaaggaaataatgtatacagtgatctatttccaagacaaagtgccttaaattggcttaggtcagcaaagtacagaagaaacagggtatactaggtccctgcttggatagcggatgcctgcttgtcgcccccctctttcctcccccttcccatcccccatccttggtggccttcacccaaacaaaaacagtttagtctaagatataagtttactagtctgcaaaatagctcactttgtctgttcttatcagcctgcccagctacttaggtcataagtcaaacacttaaagagcccttgagctaaccaggattgcaatgcattgtgggctgcaacaaaatgcagcaagacaaccctaaaaaagagacacctaaagcctttgcctaacaatcagtaggcaaacgccgagaaaattgtaaccccatagcactcagcctatgaggaacctggggagggacttgcgcactaggggacaaattgcttgttgaaactgttctgggtgtgcctgcacgccagacacccgatcttgatctctcaagaccgtcattaaaagtctcactttcgctgttctccgggtctctgagtccattctttgggtttagatggatgagtttattttctcacataacagctgcagaggtggtacaggtgaatccctctcaagtcaagtgggttaacctcaaaattgacttaaggggtggtttgtgatcgcctggtagatggtggacggttacagcttttagaaagtgagtaaaagagatgatgcatacagaagccccactgggttgcttagcttctgcacatggagaaagaggctgcttttctgccttctaggtgtttagtaacttaatttttaatcctttgatgaaatagagtggaaaataaaaggagattttcttttaacaaaatagtgttaagatgcttgccaagtatccccctgtgaatttctgcttagcactgtgatatcagaattagaaattgtgcagggttctaatctggagatatgggatgttcagtagctaagaaggaagttattccttgaaagtaagtacagtgaggtagaaaaggatccattgggattgggagaataaaagttcattatttttatttattaaaaaaaacaaaacaaaacaaagaaatgaggttttggctgggtgcagtggctcacgcctgtaatcccggcactttgggaggccaaggtgggcagatcacgaggtcaggagattgagaccagcttggccaacatggtgaaaccccatctctactaaaaatacaaaaaattagccaggcgaggtggcaagtgcctgtatttccagctattcaggaggctgaggcaggagaattgcttgaacccagaaggcggagcttgcagtgagccaagatcgctccactgcagtccagcctgggcaacagagtgagacttcatctcaaaaaaaaaaaaaaaaaaaaaaaaaaaaaaaaaaaaaaaaaaaaaagaaagaaagaaaaaagaaaaaaaaaagaagaaacgagcttctaccctagatggatcttggactctggagttcagagagcttgccatttcagaccagaaacttccttaaagaaccaagagaagtaattttctccctgctaaatttcagctgaggtgattgagatcttttcctcatttgtcattatatttgtcatttgtccttatgtttgtagttaaatagcttggattaagtttcagaatttgtcggtctctaatggaaaaagtgaccaccagcacatcaccagcaatcatcagccacttgtagtggaatcttttagtgaaagcttgcaggacttttgcaacctgggtgaggaagcagttagaagaaagtaagaaacgcaaaagaacttgagccttaaccttctgatctgaaatcagacttaggtcacagaattcaatggtttctgactattttatttaaactggaaatcggcgggatggcaaggaatactacttgcttctatagtgtgtgatccacattagtgatttgtggaactaattaggacagggggataattctaagcaacaaagaactgtaagtgaatgaacacgaattatctccctgtatgagagagaaatgcagaggccaacacaattcccttgaataggtggggaatatcatggagaacttcctaaggtggctcataggaaaaaaaagagtggaaatactggaagttgaacgcaggacctcacgcatgctaaccacgtgctctgtccctgagctatacccccgcaggagatcaggagcttgggaaaatgttttggtgatctccgttgcctgagtctgtgctctgtgtcatcaagacaatcactgtatgtttccaattccactgtttatgaattcccgacactaagcgccctctctctctctctctctctctctctctctctctctctctctctctctctctctctctcgggcatggctacaccaggagaaagatatcttgtggtaaaaacaaaggcattgttcctgatgttcctgatttgtggtcagtccaagatcaactcaccccaaagtggtctccccatcatattagactttctggagcataattccattctatcccttgagtgacctccggcatacaacattctcttgcaaattttctgattataacttttttcttttgactctgggaagcatcttagtgtttcccatagtcaaaaaataaaactcaggtatgtgtgaaaataccctaaaattcagtacaaatagaggcaaattaactgcatttcaaaagaataacataaccacattgaagaggaaagaactgatataagaaaatggtttacacagattgttgttctaattgtgagatcaaaaagaacatcgaacaaatcttaaactctatgtatcaggattattttttgtagagtgagggctgtagcaattctgatattttgtgtgaattttaggattgggaaatcgagtgtctgttgttggaaacagactctcactgtgggagaagaaggaaggtaaagaatagtcctgttgatactgatgggaattagaggcatcagtatgaaattgtacatatgaaattgtaaaatttccccacagatctatctgctaactgggcctagaagaaatgatacctcagaagcaatgagcaaagataactctgtatcttgattttcaaataccattccctactaaaaggaaccagagatactaatagaaagtagctattagtgtcaactacacagactccaggactgtgccagggaaactgcaaaatgaacctaagatatcttgccttgccagaatgtaagtgctcagaaatgacgggggtgatttaaaaggacacagaagccagcttgaagggaatctcactggccaaatctgacacacttttagcatcagtgatgacaataactgattatcattcttgggaacttaaacaaataaatatggaggacgggacgattttccttacagtggtttgccaaatgataaatgtgaaagtgagtgccgggcgcagtggctcacgcctttaatcccagcactttgggaggctgaggcgggtggatcacgaggtcaggagatcgacactatcctggctaacacggtgaagccccctctccactaaaaatacaaaaccttggccgggcgtggtggcgggtgcctgtagtcccagctactcgggaggctgaggcaggagaatggcgtgaacccgggaggcggagcttgcagtgagccaagattgcgccactgcactccagcctgggcgacagagcgagactccgtctcaaaaaaatgaacaaagaaacaaagtgaggataaaatttaaaaatccccatttaaacaataccatcagaatgatgatagatgcaggcaaaatttgtaagttaatgttaaagtataggtaaaaatttgatgaggatcaggatatttacgtagtctcagagtatttccctgtagattatttattaattacaatgaggaaaatgataatttttcagggaagaaacagtaattacaaacttaaaatcaagtgatcaagctaacttcagtcagctcatgcctcttggtgtgagagagggtaataacgtgatttctgtgacatttctcccaaattccataacccgatgtaatcttatcatggctaatacagattaagaaacgttgcacaaaaccactggaaaaactcttcaaaaacatgtcggtgttgtgaaagacaagaagattaagaaactgttccaaattaaagggcactaaagagtcaagacaactagattcatatgtgattctgaaatggatcctagcttggaagagaaatttctataaaagtttttattggtacaattagacaatttttaatagactttatattagactatattcacatttatcaatgtcaaatttactgaacttgataattgtgttgtgttaaggaattgacctttttcttaagaaatacacattgaagtatttaagaataaaaagatatgatgtctgaaaatcattatcaaatagtttagagaaataatctttgtctgatatatatatataatacatactacatatatatgatatgtattccagtattgttgatttgtcattgaggaaaagatgttttgaaattatcccaagatttgaacaatatatgcttctcagatggtcccactttattttaaatgttgcaaggcagagacaaaggtacaaatttctcaatttgtattagaatttagaaggtgttttattctattttccttgtcacactccttgcttgtgagtcaatcaactaaggacatctgaaagagacagagtttctttctcagagtcaggaggtaatgaggggctgctctggtagggaaagaaatagtgaagttcttttttggagaaaagcagcaaaaaaaaaagagagtgacaggagaaaaagaaagaaagaatggaaggaagggaaggaggaaaagaaacagtaaagttgacaaacagaactcccttccctctttattagtcttcaggaaatatagagtttgaaactatcatagcccaggaaaccctttaaatagggccatcagtaggccagaaattttgattagtgccttgaaaataaaagcatagccgggcgcggtggctcacgcctgtagtcccagcactttgggaggccgaggcgggcggatcacgaggtcaggagatcgagaccatcctggctaacacagtgaaaccccgtctctgctagaaatgcaaaaaattagcctggcgtggtggcgggcgcctgtggtcccagctgctcgaggaggctgaggcagagaatggcgtgaacccgagaggcggagcttgcagtgagctgagatcgcgccactgcactccagcctgggagagagagcgagactacgtcttaaaaaaaaaaaaagaaaaaagaaagaaagtaaaagcagaagtgattagacggacaggaaacagcagaggaaatggctgctgtttcactacagttaaaatgtcttacacatctgtgaactatttgtcctcttctcagaggagggacacttttttaggtactaaaaaagaattgtctggcacttcatggcagcaacatgtttgatgttaactgacatttccagacatccaggtatgatttttatttagcgactttaaaagaaggatgagaaaaaaaacaaaaaaacaaaaacaaaccatgagccaggcgtggtggcctgcatctatagtcccagctacacctactcaggaggctgaagaggaggcaggaaaacagcttgaggtcaggagttggaagccccagtgctctacgattgccctggtgaatagccactgcactctagtctggtcatcaaaacaagatcccgtctattaaaaatagaaagaaaataaaggaagaaagaaaagaaaggaaggaagaaagaaggaaggagcgagagagaaagaaaggaaggagagagggcaaaaggaagaaaggaatggagggagggagagattgacagaacagattagaaaacataatccaactatacactatctaaaagaaactcatttcaaatataattatataagcaggctgaaattaaggggataaaatatattacatgcaaaagttaatcaaaagaaagcaaaagtgactatattaatataaacttaagaacaaagaaaatccaccaagaaggcataacaatcctaaatatgtatacaccaaacagcagagctgcaacatgtaaaaaaaaaaaaaaaaaaaaaaaacaggaccgggcgcgctggctcacgactgtaatcccagcactttggaaggccgaggcgggcggatcacaaagtcaggagattgagaccatcctgaccaacatggtgaaaccccatctctactaaaaaaaaaaaaaaaaaaaaaaaaaaaagctgggcgtggtcgtgcgccctgtagtcccagctactcgggaggctgaagcaggagaattgcttgaacctgggaggcggaggttgcagtgagccaagatcgtgccactgcactccagcctgggcaacaaagtaaggctctgtctcaaaacaaaacaaaacaaaacacccagacagggcgcagtggctcacgcctgtaatcccagcactttgggaggccgaggtgggcggatcacctgaggccaggagttggaaagtagcctggccaacatggtgaaacccgtctctactaaaaatacatacattagccgggcatggtggtgcagtggcgtgcacctgcagtcccagctactagggaggctgaggctcgagaattgcttgaacccgggaggtggaggttgcagtgagccgagatggtgccactacactccagcctgggtgacagagcgagactctgactcataaataaataaataaataaatgtaatacataaataaatattttaaaaaacaaaaaagatagaattaaaaaaatcgacaaatgcagttacattagagacttcacttctctctctctcttttttgtgaatttgttcttattggggaagacggcacagggtgggaaatgtcgccttgggctatggtatgccccacctcccagagaatgtccatttgcattctaatcttcctgggatgctttatggaactttttcttcttcttggagctgctcttgccagccgcctcttcaggcccactgctgaccagctcctctttggagaatttcctcgttttcttggagccacttctgtggcctgactcttcggtgtcattaactgtttcctccttgggtgaagacttcttcctcttgggaagactggtgctgccagcggtctcttcaagatcgctactcatcaactcctccttggaaaaagatttctttttcttgggtttggagaaagagatagatgggtcttccattccattctcctgatgaatctcctggggcttttgctttttcttctttttgggtttttcaatcgtctcctcacacgctctgtcgcccagtctggagtgcagtagcgcaatcttggctcactgcaagctccgcctcccgggttcacgccattctcctgcctcagcctctgcgtagctgggactacaggcgcccgccaccacgcccggctaattttttgtatttttagtagagacggcgtttcaccatgttaggcagggtggtgtccatctcctgacctggtgatccacccgcctcggcctcccaaaatgctgggattacagacgtgagccaccacgcccgcgccatttctctcataataacagaaaaactacacagaaaatctgcaaggatattgaagaaccccaaatcatcttcaggcaacagaattcagtcaccatgtatagaacagtccacacaagaaaagcagaacacgcattcatttcaaattcatacgtaacgtagatcaagatagaacatacctcataccttgggcctcaacaaatttaaaagaattgactgacatagtatgatccctaaccacaatgaaatcaaactaaaaatcagtcacagaaagacaacaaaaatatccaaacacttggaaaatgaacaacacactactaaatattccataggacaaagagaaagccttagtagagatcaaaaaaataaattaacctgaataaaaatgaaaacacaatgtatcaaaatttccaagacaacttaatctctgagagagaaatttacagcactaagtgcatacattagaaaagaaaaaagtcggccaggcgcgtggctcacgcctgtaatcccagcactttgggaggccgaggcgcgtggattacaaggtcaggagttggagaccagcccggccaaaaaaaaaaaaaaaaaaaaaaaaaaaaaaaaaaaaaaagaaagaaaagaaaaaagtctcaaatcagtcctttaagctcttacttgaagaactcaggtgggggaaaataacccaaagcaaatagaagaaaggaaatgagcagaaataaacggaactgaacacacacgcacaaaatagaaaaacaaacaaaaagctagttcctttaaaagatcaataaaagaagacctctaggaggactgataattttttaagaagagagatgacacaaattgccaatatcaagaataaaaagaagagtatatcactatagactctgctgacatcaaaagggtaaatgaatactatgaacaacactttacacacaaatttgaaaacttagatgagatggactaattccttgaaaatcacaaactatcacaactcactcaatatgaaatatatttttctataaccttgtaactactaaggaaattaaatttgtgatataaaaactttaaaaaaaaaacagactcttcaggttcaagaaagtttcactgtataattcgtcgcccccgccctccaccccctcccccagaaggagtcttgctgtgttgcccaggctggaatgcagtagtgcaatctgggctcactgcaacctccaccttccaggttcaagcgattctcctgcctcagcctcccaggtagctaggattacaggcacgtgccagcacgcccggctaatttttgtatttttagtagagatggggtttcaccatgttggccaggctggtttccaactcctggcctcaggtgatccgcctgccccggcctctcaaagtgctgggattgcaggcatgagccaccgcctatgccaatgtaggcatatcttaaaaggatacatgacctggggatactttgagtattcagattaattaatttttaaagtgttttttaaattctcccttcttacatcttcttttccttctgccttcaagggctgtcacacgaagagtagcgtaggtggataaaaaaacagaatggtcagtaccgcctgggggatttaggtccaggtgaggaggtgagaaggtggaattcccagctcttagaaatgaagacccaggaagtgggtcgctgcctgtccttaccctcgccagcccctgggccggcaccgtggctgaaacccagcatggatttcatcttggggacgttgtggctccagttttgagactcaagtaacgatggatggagaggagaacaaggaccacctgagctcgaccacaagagctcgaggagggaagcagggacgcggtggggtgcgcacctgcggctgcggcagcaaaggcggaggaggagcgaagtggacgagcacccgaggctgccagaggatctgggcagcctgggtgcccatctctgctgcgtttcctcggtgtccacgataggtgagagggctcattccctgtaggagaagtgagctgaaaacactttccccgcaagatctccctcgttttactcaaggtagtcgcggcgttgagaacgcctcgcagctcctttactggctggggtactggggagcaggggtacccttgagttttggtacaggcgggtggtattggtggcttccgaggaaaggacagagaagccgcctatttccaatccctactgttcgtcagggggagagtgttgaaccaggtctctctagaccctcctgcttaagcccctttgttataggtaggagagtgtgttctgttttggtatttgagtgtgtgtgtgtgtgtttagcttcttgagcttggaatatgtcatgaaatacaagaaagatcagggagtctcagtatattttaaacttaaattggttttcagaagtacttataccttgttcctaaggaattcagggtgtccagatttcaacctgcctagcagtgcgaagctctatgagtcgaatatcctaggctttcttccatatcagcaagcctctgaaatttaggtttctttctggagaatatcacccacactttggcagtgggctcctacattgcctacatccaactcttggaagcaagaagagtgggcaaaaccaaggtcaccacacaaaagtatatccctacacgagataagtggaaataaagcactggcttaggtgtggagaggaagagacaaatgtgaaaacgcagaaggtagacagacagagaacatcttccaaggaggaagagtctcctaaccacaaggaactctctacttaatgctgcgaagatattttaattacattttatgcattagattgctttttttgtttgtttttgttttttgtttttgatggagtctcgttgtgtcaccaagcttgagtgcagtggtgccatctcggctcactgcaatctccgcttcccaggttcaagggattctcctgcctcagcctccccgtagctgggactacaggcatggccatcatgcccagctaattttttattctcctgcctcagcctccccggccaccatgcccagctaatttttgtatttttggtagagacgggtttcaccatgttggccaggaatgtctcgatctcttgacctcgtgattcacccgacttggcctcccaaagtgctgggattacaagcatgagccaccgcccccagccacatagactgggtttttaacaactggatcttagaccagaatattggcagaattggtgggggcttgacagagagcagggtgaattccaaccctgagggtggagcaagaatgattacagtgtcttcctcagagcttagaaacttccaagctctaaggaaaggccttaggtttcaaattgaaaggccaaaatagcttgagatggctccaggtattttggctggaaagagtctcctggctctaaagaacccctgtgagttcttctacaggaaaatcagaggctcttgtgtgtgatctctagtcatctaaaatattgaaggtctcaaagaggtaataaatccactctcatcctgatgtaatgcaaatacgtcactggctttcctacgtggtttgagttttttattgaaaataggcagggaaccccgggagcaactctttctccttagcaagcatctggccctgaactccttctgaaacttctagagcagtgcttctcaaactttagcatcagagtcacttgagggcttattcaacacaggtggctgggtcccactctcatcaattctgattctgtagatctgaggttgggcctggaatttgacattccactagtagcaccctaatccctcatgccttgctctcctgtgcagcatcctttgtggcaaacatgacactatttccttaaagtgcctggagagaaccagtagatagtaggggggaaatattaagaaatgaaaagaaaatatatggcatctcttcgttacctgtctccaaaaaatgcatcttgaaacaaacatatgattggcctgggggcacacagccaatcctcagctaagcaggtttcaccagacagtatccctcctggatactggttatggatattttcaccggataaaagaatcaagaagtgaggacatcccagcctgatagagtgttagactggtggatggtgacaaacatcatactctgttgcctctcaaagatgctttgattcaacagcaaacatgtacagaggacagcaattttgaaacatacaacattggaaacccctaaaaggtatcatcagtgaataggatttcctgggagttccctggtcatgcaatgcaattgtgatgggattgacagagaaagaacaaaaaaaatttgttttcttttgtttttacctgaggaagtgctcaacacacctgcgatccactcaccttttactttgcgtctattttccattgtgacagaaaaacttttcctactttttcacatgagtcctccgttggctgttaacagaggtttccaggcaatgttttattttaacaaggaaaatggaatggctgaggaaatacaggaaaatgaatcaattgtatcagtagggaatgttgatccgtattggtttctgctcctctcatgttgaaggtctcttattccctgacagtctttgttcggtcatccagcgtccttccactcccatctcaagcggctggagagccacagcagtccttgtctcagtattggattacacttgtggctgtgctttctgcgcaggttgacagggagagactggaggagaaatcagtggacagatgctttcgctctgttctttggcccagaaaacaaaactaaagtaaaaaaaaacaaaaaacaaacaaacaaaaaagatgatgctgggagcggtggctcacgcctgtaatcccagcactttgggaaactgtggcgggtggatcacctgaggtctggggttcgagaccagtgtggccaacatggtgaaaccccgtctctactaaaaatacaaaaattacccgggcctgatggcacgcacctgtaaacccacctgccgaggcagaagaatcgcttgaacccgggaggcagcggttgtaatgagccaagattaagccactgcactccagcctgggctacagagcgagactctgtctccaaaaaaaaaaaaaaaaaaaaaaaaagaatggccgcggggcgcttttctcccttcttctttgtctttccttctctttaatcatagcacaaaatgagagcaaatgtgaacctcccgtggatgtgcacacttttgtttgggttcaagagaccctgttgggatcccattcttctttcttcctcatttctttttcaccttccttctgccgtcacaatcgccttcagtgatgtcgaagctcacggcatagaaatgggttataaatggaggcaacccattgggttacgtctttactctctatatgtgcagaaataggacagaaaaaggtgcggaggcagaagtaagtctatgttgcttgagaattaggtttgagcactaccagagcaaaaagtcaccgtttggaggtgccggggatcgaacccgggacctcatacatgcaaagcatgcgctctaccactgagctacacccccttcctgaaaaaaatccttcttgtaataatttccaggaggtaactttctttttctgagtattgtggagcgtctgcagctgctgtgagtagaagatactaggtactaacgggggatacaaattatttagaatacagtatacgacttgaaatggaaggcgcctgtaatcccagctactggggaggctgagccaggagaatccttgaacccgggaggcggagattgcactgagccgacatcgcgccactgcactccagcctgggcatcggagcgaaactcaatctcaaaaaaaaaaaaaatcacttcctaggtttcagactgtaaataatttatttaatgtcagcgcttcatggaagacttcactggaatatgcaaccaaagcagagagtgatgcatatatatatatatgcgtgtgtgtgtgtgtgtgtgtgtgtgtgtgtattacctttatcggattttcaacagcaaaaaattggagttctatacacctttctgggattggcatgcaagtgttgtataagggttgtatcagccgagcgctgtgtcttacgcctgtaatcccagcactttgggaggccgaggcgggccgatcacctgaggtcgggagttcgagaccagcctgaccaacatggagaaactccgtctctactaaaaatacaaaattagccaggcgtggtggcgcatgcctgtaatcccagctactcgggaggctgaggcaggagaatcgcttgaactcaggaggcggaggttgcggtgagccgagttcgctccattgcactcagcctgggcaacaagagtgaaactccgtcaaaaaataaataaataaacaaaataagggttctattaggcaaaactgaaagaaagaaagaaaaaaaaaaaaccctgccgaaacccgggatcgaaccagggacctttagatcttcagtctaacgctctcccaactgagctatttcggcttcccgaatttgttgttttaggtgtttcttcaaaatataaaaactcatttgtagggtcagtatatcttccaattctgttgtcttcaatatcacctgtcattcactcaccccttcacccccaaaatatagattcttccccaatttatgtctgaaaacaggacccaattttaaggacaatgaatgggttagcaaaagccagggaaagaaaaggcaaaaatgaagaatagagcaaagtaagaacatgctcccctacatggtcactgctcagaataccaagggaattcaaaagaaaattttctaggcttttccttttctctgggctcttgtttttctgtcttgctcttcaacgatatggcaaaaaggaacagaggattattgggcacgttaatgtggtggcaggtttatagcttctgactaaggaaatcctgagcgagaaaattcattttcgctattcccttcctttcactcgtcttgtgctgacacatccaccttgggtggtacagagacccagggagtggaaatggaaagtataatatgtttattttagtgtgaccacgcaaggcatgtttttaaaaggagaaaagtacagagtggcgagaattgtgaaaaacagatgaacatgtatgcttttgaactctgtgcaaggcaaggacacactaccactgagccacacctctctcgctacagaaacatcgtgaagatcttttttgacgcattagtcatatttctgagaggtcttcaaaaatatggtaagttggccggatagaaaatccactgtctcatatctcactatttcttacctctaaactatatcccctgaagctgctaggagaaatgtaagagaatcacagaccagaacacagtttctgcttttggaacatttcatcccatcagtttattctgaggtttcctctccagcaaactgcctgggggcattttctcccacagccaacaggtaagatgtccagatggaacttcctctggggtcttcaacctgtctgtctccatttcttctctttcatctgcttacaaagtttttcaagccccatcctccttaagaaaagatgatgagccacagtctaggagaagatattccaatacttatattttactaaggatctttatctggaatatgttaagaacttctacaaagcactaagaaaaagactaaaacttcaataagaaagagcaaattaatatgaacttcacaaaaaatcgctattgagtaaaataaaatatgctcgacatcttttgctataaaggaaatgcaaattaaaaacacaacaatgctggacacagtggctcacgcctatactcccagcagtttgggaggtcgaggcgggtggatcacttgaggttaggagttcaagaccagctggccaacatggcgaaacccggtctctactacaaatacaaaaatttagacggccacatgcccctgtagtcccaactactcaggaggctgaggcatgagaatctcttgatcctgggaggcaaaggctacagtgagccaagattgtgccgctgcactccagcctgggcagcacagcaagacactgtcgaaaaaaaaaacacaaaataatattgctcttcattggaatcatttaacccaaaaagtggataatatcaagtgttgctgagtatgtgaagcaattggaacgtgcatacatggctgatgagactgtaaactgctatatctacactgggaaactatctgaaaatatcaactaaatatatatatatatatatatatatatatatatatatatatatatgctatgaccccaaaactagacggttacatttatacccaagagaagtgcatgagcatctcccttgaaggacatgtatcagaatgtttacagcagcattagacatttcaaccaaaaacgaggggtgctgcaaatgtacttggacagtaaaatgaattaataaatcatgatgtacagtattcagacaatagaatactcgagagcaacagaaaataactactgttactagcaacaatatatagaaaatgaaggctgggcacggaggctcacgcctgtaatcccagcactttggaaagctgaggcgggcagatcacgaagtcaggagatcgagaccatcctggctaaaacagtgaaaccctgtctctactaaaaatacaaaaaattagctgggcgtggtggatggcacctgtagtcccagctactcgggaggctgaggcaggagaatggcgtgaacctggtaggcagagcttgcagtaagccaagatcgcgccactgcactccagcctgggcgacagagcaagtctccaccttgaaaaaaaaaaaaagaagaaaaaagaaaagaaaatgaatctaatttttttaacaaaaattaagtgaaagaatccatactcaaatgagtacagatttgctgtggtttgaaagtgtcccctccaaagcttaggtgtcaccatgtgataattatcaagacatagggcctttaagaagattaagccatgagggttccttcctcatgaataatattaggtacccttataataagagttgacaaaggaagttcatctctctattgccttcagttttctgccatgtgagaacacaacaaaaaggccatcaccagacatgagagccagtgacttgatcttgaacttcccagcctccagaactgtgagaaaatgtttctgggcctggtgcagtggctgtctcctgtaatcccagggttttgggaggccaaggtggatggatcacctgaggtcaggagttcgagaccagcctggcaaacatggtgaaaccccatctctactaaaaatacagaaaaattagctgggcgtggtagcattcgcctgtaatcccagctacccaggaagctgagacaggagaattgcttgaatccgggaggcagaggttgcagtgagccaagactgagccactgcactccaacctgggcaacaagagtgaaactctgtcaggaagtgaagggaagggaagggaagggaagggaagggttctgttcgttacaaattaccagtcttgagtgattttgtagcagcccaaaatagactacgatgatattatatgatcccatttatattatttaaaacataagaaaaataatctatggaggtggaggtcagagagttaggataattgaaatgaggcaaaaggcagctgttggttgctgaaaaattcagtatcttggcctgaattttggttatatataataagccgtaagctgaataggtttcatgtgttttattttatataaatgaaggcttaaatttaaatacaagaaaaaaaaaggttttcctaagtacttcctatcctccagtacattctctctcttccttagggttgttttgttttgttttgttgagacggagtctcgctctgtcgcatcctcatgattattaggacttggatggacgggatggtacagtgagtctaagcgccacatccctccgtcgcttcctctggatatgagggaagaaaggtactttttttgtccttagggaggaagactcgaccaggaaggggacctggttcgtttcggcttcaagagcgcctctccgctatttccgtcgctcagcagaccggctgaactctttggaggagagagtgatactgggttttggtttgcccttcaggaaccgctgatactgtagcttctgagggagctgcagggatttcccgatttcctgcgtgcctgtgttaaaagttagaagcgggatctgctggcagcttcgaaactgagcatgacggtggaaacatctaattttattagtttttgcttgaaatgcaaaagatgagaaagaaagtttccgtttgtttgctccacatatttctcttagaatgaagccgattgaaagttaacttcaccctgaagaaactcctcctggcgtttgcaacgatctcctgtatgtctcacgtccagcttgactcaaaaggactctaaagagctggagagcggctgcggaaaggcggagtcacggtacaatcggtgttaactacttgtgcaaccaccgcctccttagtcctattagaggcgcagaggcagtatagctgaatccctcacaagtcgagtgggttgacctcagattgactttagcgatggcttgtgaccacctgatagatagtggccgttacagcgtttagaaagtgagtaaaagaaaggatgcatagggaagcccacaagtttgcttggcttctgcagatggagagaggtcgcttttctgccttctggatgtttagtaacttattttttatttcctttgttggcatgaaatagagctgaaaataaaagcagattttcttttaacaagatagtattaagatgcttgcagagtatttctctgtggatttctgcttggcactgtgataccacaaagagctctaatctggaggtatgggttgttccctagcttagaaggaggtcaatcctggagagtaagtactgtgaggtacaaaaggatcctttgggattggaaaaataaacgttcattacttttatttatgtaaaacagcaaaatgagctttctcctatactgatcttggtccctggagttcagagtgtttgcatctcagaccagaagcttcctcagaggacccagagaagtgctttttacttccaccaaatttcagctgaggtgaatgctgtcttttcgtcatttgttgtgtgtttgtagttaagtagtttaagtttcagagtttgtgggtctccaatggaaaaggttaccaccacacatcaaaccatcaacccctggcagtgtaatcttttagtgaaagcttgtagggcttctgcaacctggttaggaggagttagaaaaagaaacagaaaaagacttgagccttttagcttctgatctgaaatcagacttgggccacacaggtctatggtttctgatgatttcatttacagctagaaattggctggatggccaggaatactacttgcttcccccgtgcgtggtccatgttaatgattgatgggactgcttagaaagaataggcggataatcctaggcagcaaataacctcaagtgaatgaacacgcatcaccctctgtatgagagagaaatgcagaggccaacacaattcaccttgacagacagaaaaatttaaagttggggaatatcatggaccgcttcttactggtgtcccggggaagaaaacacggcctggaggtactggggatcgaacccaggacctcgtgcatgctaagcacgcgctctaccactgagctataccccctctggactcagggccttcggaaaacgctttggtgacggccaatatgtgagcctgccctctgtgtcaggataatcactatatgtttccaattccattgttaattccctacatgaagcgcttcctcttttaggcacggctgggccaaaagaagagtagcttagccgggtgcagtggcttatgcctgtaatcccagcactttgggaggctgaggcgggtggatcacgaggtcaggagttcaagaccagcctgggcaagatagtgaaaccctgtctctactaaaaatagaaaaattagccgggcgtggtgacaggcgcctgtaatcccagctactctgaagtagagaattgcttgaacccgggaggcagaggttgcagtgagccgagatcgggccactgcactccagcttgagcgacagagcgagactccgtctcaaaaaaagaaagaaagaagaaagagagagagagagagagagagagacagaaacaaagaaagaaagagagaaataaagagaaagaaagaaagagaaaagaaaggaaagtagcttagtggtaaaaataaaggcactgttcctgatttgtggtcaacccaagatcaactcaccccaaggtggactctccatcacgttagacttcctggagcatacttgcattctatcatttgagtgtgtcccggtatacaacattctcttgcaaattttctgattataactttctgtattcttttgactcttggaagcatgttggtgtttcacatagtcaaaaaataaaactgactcaagtgcgtgtgaaaataccttaaaattcaatacgaatagaggcaaattcaaatggcgttgtctatcgcttctcggccttttggctaagatcaagtgtaaaattgcattgtgaaacaataacatactcctacttgaaaaggaaagaactgatctatgaaaatggtttatacagtttgttgttctaattgtaagattaaaaagaattgcaaacaaatcttgaactctgtatcagggttatttttgtagagctagggctgtaagaattctgagattttgtgtgaattttaggattgggaaaatgagtgtgtgtgaccgggtgtgttggaaccaggctgtcactgtaagagaaagaaggtaaagaatagtcctgttggtgttgatgagaattggaggcgtcagtatgaaattatacatatgtaattttataggctgggcgcagtggctcacgtttgtaatctcaacactttggcaggccaagacgggcagctcacttgaggtcaggagttcgagaacagcctggccaacatggtgaaacccccgtctctactaaaaatacaaaaattagccggatgtggttgtgcgtgcctgtagtcccagctactcggaagtctgaggcaggagaatcgcttgaactcaggaggcagacgttgcagtgagccaagatcctgccaccgcactctggcctgggtgacttagactttgtctcaaaaaaaaaaaaaagtaaaatttccctgcagatctgtctgctaactgggcctggaagaaatacctcagaaacaataagcaaagataacaatattttgattcacaaataccattccctactaaaaggcaccagagatactaatagaaagtagctactagtgtcaactacactgactccaggactcatgccactgcactacagcctgggcgacaaagcgagactctgtctcaaataaataaataaatatggaagatgggaagattttctttacagtggtatgccagctaataaatgtggaaagaaggataaaatttgcaaatccccattagaaaattagaaaatctggacaccatcagaatgctgataggtgcaggcaaaattataagtcaatgctaaaagtataggtaaaattttgatgaggatcaggatatttatatagtctcagagtatttctctagagcttacttattgattacaatgaggaagatgatacttttgcagggaagaaatagtagttacaaacttaaccaaatgatgaaagctaacttcactaataatggggaaaattggcatcacatgcttcttggtgtgatagaggataatatgattttttgtgacatttcttccaatttccataaacttaatcttaccatgagtaggacaaattaagaaatattccacaaaccactggcatatactcttcaaaaacattatcaaagttgtgaaagacacaattgagcaactgttctaaattaaaggagactaaagagtcaagacaattagattcatatgtgtctgtgaaatggatcctagcttgggagagaaatttctataaaagattgtattgatacaattagttaaatttttatagattgtatattagataatgctattttatcaatgttaagtttactgaatttgataattgtgctgtgttaaggaactgatcttgttttaagaaatacacattgatgaatttagggattaaaaagatataatgtctgaaaatcatcaaatagtttagagaaataatctttgagatctctctctgtgtctctctccatatatatatatggagtgtatatatatatatatatatatatatatggagtatatatatatatatatatatatggagtatatatatatatggagtatatatatatatggagtatatatatatatatggagtatatatatatatatggagtatatatatatatatggagtatatatatatatatggagtatatatatatatatggagtatatatatatatggagtatatatgtatatatatatggagtatatatatatatggagtatatatgtatatatatatggagtatatatatatatatggagtatatatatatatatatggagtatatatatatatatattccattgttgctgattgtttggttgaagaggcaagatggtctgaaatgatcccaagatgtggacaatatgtgcttctcatgtggttcccattccattttaaatgtttccaggcagaaacaaagatacaaatttctcaatttgtattcaaatctaacaggtgttttattctattttcctgttcacactccctgtttgggagtcaatcaactaaggacatctgaaggaaacagaatttaattctcagagtcaggaggtgatgagagactgctttggtagggaaagtaatagtaaatttgttctttcttggttaaataaagaagaaaaagaaagaagagagggaggcagggaaagaaatagaagacataacaatcctaaatatgtatccaccaaacaggagagctgcaacatatgtaaagataaaaaaacagaactttaaaaaaaaatagacaaatccacaattactttggagacttcaaaacttctctcataatgattgatagaacaactaaacagaaaatcagcaagaatgttgaagaactaggccgggcgtggtggctcacacctgtaatcccagcactttgggaggccgaggcgggcgaatcatgaggtcaggagatcaagaccaccctggctaacacggtgaaaccccatctctactaaaaaatacaaaaaaattagccgggcgtggtggcgggtgcctgtagtcccagctactctggaggctgaggcaggagaatggcgtgaacccgggaggctgagcttgcagtgagccgagatcgcgccactgcactccagcctgggcaacagagcaagactctgcttcaaaaaaaaaaaagagtgttgaagaactcaaacatcttcagccaccagaattcagttaacatttataaaacagtccacacaggaagagcagaacacactagtcaaatccacactgaatataggtaaaggtaaaacatatcctgggccataaaacaaacctcaacaaatttaaaagaattaactaatatggtataatccctgaccaaaatgaaattaaagtaaaaatcagtcacaaaaagacagaaaaatgtccaaacgcttggaaaatgaacaacacactactaaacagttcatacaacaaagagaaaaccttagtagatatcaaaaaataaggtagcatgaataaaaatgaaaatacaatatattaaaaattccaagatatcctaaaggagtgctgagagagaaatatacagcactaagtgcatacattagaaaagaaaaaagtcccaaatcagtcctctaagctcttacttgtagaaatcaggtgggaaaaagagcaaaataacccaaagcaaatagaagaaaggaaataataaaaaataaaagcagaaatcagtgaaatggaacacacgcacacacacacacacaaaaatagaaaaacaaacaaaaagctagttcctttcaaggatcaataaaagaagaactctagcaagatagaaattttcagcagagagatgacacagtttaccaacatcaggaataaaaagaggacatcactgtagactcagctgacatcaaaaggatgaaggaggctgggaatggtggcccacgcctgtaatcccagcactttgggaggccgaggtgggtagatcacttgaggtcaggagtttgagaccagcctgaccaatatgtcaaaaccccgtctctactaaaaaacaaaaattagctgggcatggtggcaggcgcctgtgatcccagctactcaggagactgaggcaggagaatcgcttgaactcaataggcggaggttgcagtgagccaagattgcaccactgcacttcagcctgggtgacagagcaagactccctctcacaaaaacagaacaaaacaaaacaaaaacaaacaaaaaagaaatggtaaatccaaccccacccctgacataatgcaactacaaaccccactggctgtcctacgtggtttaagtttttgattgagaataggcaaggaaccccaggaaaaaatcttccccctcagcagccacctgatcctgggacctccttcttaaacttctagaacagtgcttctcaaactttagcatcagagtcacttgagggcttattcaaacacaagaggctgagccccatgctcagcagttctgattcaatagatctgaggttaggcctggaatttagcattctgcttgcagcaccctaattccccaccccttgctctcctgtgcagtgtccgctgtggctgacatgccgctgtttgcctggagagaaccaatagatgccaggaaattaaaaaagaaaaagtatgaaacacaaagaaaatacatgacacgtgggtattaccttcctccaaaaaatgtatctcaaaacaaacatgtgattggcctgggggcacacacacagccagtcctcagctaagcaggtttcactagaccgtatccctcctggatgctagttatagatactttcactggacaaaagaatcaagaagtaaagacatgccagcctgatagagtgttaggctggtggactgggaataaacattgtagtttcttgtctctcaaagacactttaattcaacaataaataaataaatatgtacagagagaacagcagttttgaaactgtataccattggaaacctttaacaggtaccatgagtgcatagaatttcttgggagttcccttttcaaaaaaagcagttgtaatcagatggatcgagaaagaacatgaaatgtttgtttggttttttccaaggcagaaagcgcccacacaattgcgatctacttaccttttactctgcatgtattttccattgtgacagaaaacctttccctggttttttcttatgggcctctgtttgctgttaccagaagttcccaggcaatattacagtgactgaggaaatgcaggaatatgaatatgaatcagtcttatggaatatcagtagggaatgttgatccgtattagtttttgcttcttgcatgttgaaggcctctaattcccggacagtcttcgtttggccgtccagcgtcctgccactcctatctcaagtggctagagagccacagcagtccttgtctcagtattggatcgcacttatgtccctatgtaggttgacagggagagactggtgtagaaatgagtggacagatgctttcgctctgttctttggcccagaaaacaaaaataacttaaaaaaaaaaagatgcccactggcatttttctctcttcttggtctttgcgtctctttaatcatagtacaaaatggaaggccgggcgcggtggctcacgcctgtaatcccagcactttgggaggccgaggcgggtggctcacgaggtcggcagttcaagaccagcctgactaacatggtgaaaccccgtctctactaaaaatacaaaaaaattagctgggcgtggtggcgggcgcctgtaatcccagctacttgggaggctgaggcaggagaatctcttgaaaccggaaggcggaggttgcagtgagccgaggtggtgcgactgcactctagcctgggcaacgagagcaaaactccgtctcaaaaaacaaaacaaacaaacaaaaacaaaacaaaacaaaacaaaatgggagcgaacgcaagccgcctgtgaatgttcatgcttttgtttgggtcaggagaccactgttgcgatcctgttctttccccctcgttacttttttgtcttccttctgctgtcgcaatcgccttatgtgatgttgaggctcacagcatagaggttggagatagttcaaggcaatgcattggagtacatttttacttactatatgtgcagaaatagaatagaaaaatgtgaggaggcagaggtctgtcgcttgagaactgccagagggaaaccatcacttggaggtgtcggggatcgaaccgaggcctcatacatgcaaagcatgcgctctaccactgagctacacccccttactataacacccatttgtaataattttcaggaggtaactttcattttctgagactccgtgagcatgctggtaatagtggtcagtaccatagagcgtggagagctactctgagcaggagatacttggtactaatgggggatacagattctttagaatactgtgtaggacttgaaacgaaaaacgaaagattagaaaagtgtcagataataaccacaagaagtttcctttgtggcctgaagacgttgagttcttagggtctgcttctattatgcttggcaagaatcaagttctgattttcgtttcttttgatttcttccagatataacacaaagccattgaaattcagccttttcctgcctaaaacgcttcataattgttgtttgctcagtcggaatatcaaaggtaagatttgatagaggaaagccatgatcagaagaaaacctgagagcggtgcactcaacattttttcacaggggtccttagctggcgtggtgtcttactcctgtactcacaactccagaggctgaggcacgaggatcgcttgaacttgggagttagcgattgtagggagctatgattgctccactaccctcgagcccggacaatggagtgagaaaagcaagcaagcaagcaagcaagagaaagtgggagtgagggacggagggagggaaagagggaaggaaggggggaaggaagggagaaaggaaggaaggaaggagaaagagggaggaagggaaggaaggaaaggagagagagagagaagaagacgggaggtgaggggagggaattcataaggcataaatgaaaaccagctttgggggtggagatgagggttgaattatgagagtaagacgaaagataaatagaaacaggattgaagagtagttcagaaaaacaaacatgctattgccaaagacaagcaggcacagaaaaggggaggttttaacaactctttcaggaatgggagaaagattgaaagatggagaagatgagttagtttggctcatgctaaatttaaaatatctgtggggcacgcctgtgaggatattacacagagaactcaggcaattaactccgtctccagcctggggtttgtaagcattagtagtagtagacacattacatggaggtggataaagactaaaaagtgtactttgagatatggaaattacaaacctattcgtgatatttgtaggcaacaaacaagttttcttctaactagttctcgaatcttgggacttatcacggtgagactggattctttgaactatataagaagatgagaagaaaacccatttctcggaaccaaatttctggtgacgattaactctttctcattctggtttgcccatatatgagcctttgccaatgttaataaaataacattgatccattttaaaattggcagattgcaagttgtatggcagacttggcttttcagttggctgacgggatttctagaataaaaataggaaactgagtaataggtttcactgaatgagagactagagaagcgttacacacaaaattcatatgtattcatgtgtgtgcgtgtctgcctgtctgtgtctgtttgtgtgtgcatgtaaatgcttgggaggattatcttgactctttgatgctgtaaaagcaatattaggacagtttgcagaaacactccttcatccttatgtcatgtcacagccagagaaacctggctgtctatcagattcttgggaattcataataagaagatatgcttttttgtttgccacatgaaaggggggaatttaaaataattaaatatccatatctatcttcaggctatctaccaacaacatgattgaaacacttttttttttgcgtataatgtgtaggatgagcttatttatcacagcattcttctgaggaattaaacatttaattttgaagacagaacaccctcacgtcatacatactcagttctgaaaacctaaaaatatataaagtacctgtttaaatctgcactttccaatatggttaccattagccacattggctattgaatgcttgaaattgcccagtccaaggtaagatgtgttgtaagtataaaatatataccagatttcaaagatgcaatatcatttttaatataaaataactcacttataattttaagatggattacttaaaataatgttgttatacaaggccatttacgtatattattaaaactggacataaaagacggaaacagtaaacatcggggactactagggagtagctgggaaggggaaaggcttgaaaagctaactattggatactatgctcactacccgggtgacaggattaatcccaccccaaccccagcatcatgcaatatacccatgtaagaatcctgcacatgtaccccctgaatctaacataaaagttgaaattatttttaaaataatatagagaccgggctcggtggctcacgcctgtaataccagcactttgggagaccgaggtgggcggatcacctgagatcgggagttcaagaccagcctgaccaacatggagaaacctcgtatctactaaaagtacaaaattggggccgggcgcggggtctcacgcatgtaatcccagcactttgggaggccgaggcgggcgtatcacggggtcaggagatcgagaccatcctggttaacacggtgaaaccccaattctactaaaaaatacaaaaaattagccaggcgtggtggcaggcgcctgtagtcccagctactcgggaggctgaggcaggagaatggcgtgaacccgggaggcggagcttgcagcgcgcgccactgcactccagcctgggcgacagagcgagactccgtcacacacacaaaaaaaaaattagctggggtggtggcgcgtgcctgtaatcccagctactcgggaagctgaggcggcaggagaatcgcttgaaccctggaggcagaggttgcggtgagccgagatcgcgccattgcactccagcctgggcaacaagagcgaaactccatctacaaaaaaaaaaaaaaaaaaaaaaaaaaaagatatagaataaatattgcctgttttttttaatgtgactactagaaaatttagaactacaaaagtgactcgcatttatgacttgtgtttttttaattatttttattccggaagataaagtagaagacttgtattatcttttaattggacagcattgtctagagatgatgttatctctttaaatgctgttctgggagattcccagagccagagaacatggagcatggtctcccagtaattaagtttcatgccttgagtgttctcgacagaatgcatttctatgcataatctccttagatctttacaacatccaatttaacataattattattagctacatttttaagctattgaatagaagacaaatcatgcttggaattaccctagaccttccctttcaacagaatgtaaaggaatcattaccgtgttaggcaagaaaacattcagtgctaccatttgactaatcaaatatttcttaatgaaatgaaacacaagcttctgagttgagaaagcctcagtgacctaaaggataaagtatctgatttacagtttctgtagagtcagtgtcctcaccctgaggtttcttctcatttggtactaattttcctttttcaacttgctgcagttctgatgttgaagtactgtagattgtttagtctcctcacacagtatgcaggagttaggggaaaataactctcaaaatgaaacagcaatttgaaagaaaaaaggagggaaaaaaaagacccattacccccaacacagtatttcaacagagaagttgaagtggaaaagggaaaatgaggcacatgcacctgaatcttgatgactttgctgcccatttgctttcattttcagtattctaaggcccctcatgaatgtctgacagaataattcatatacaagtacttgtttttgttctttcctggattccaacacagaaattagttaagatttggaaattctggacaagggtgccaggcttcctgtcagtaagaaaacttagaatattcctgtaattaggcctggtgtggtggctcaagcctgtaatcccagcatggtgagaggcagaggtgagccaggatttccagaagagccagggcaacatggtgaaacccagtctctaccaaaaaaattaaaaaaaaaacaaaaccaaaaaacaaacaaacaaacaaaaagccaggcttgttgttgcatttctgtagtctcagctactcaggaggttgacataggaggatcgcttgagtccagggaggctgaggctgcagtgagctgtgatcataccactgcattccagcatgggtgacagagtgagaccctgcctcagaaaaacaaaacaaagcaaaagttatttttccagcagtttaactgcggagctatggagttgactcaaggtacaaacccggttttttctaattgcaaaatgtttcttgaatataccaccaccacatatatacactcatacagtataatagttcttcttctacaggtttcttcacatttcttgtgatttaaaaacacccccgcccaacacacataaataacatcagatcagaaatgaattgtaagtgccacagcatatagcatattggaatttcttaggttttaaaagtaataacttgctaggtttaagactttaaataatttacgtcctgtcagttaacacttcatggaagtcttcagtggagagagtgttacaaatatatatatatatatgtgtttgtgtgtaaatatatatatatagatgtgtgtgtgtgtgtgtgtgtgtgtgtgtgtgtgtatacattacctttatggaattttcagaaaacagccaaaaaaaagaaaaaagaaaaaagaaacaaaaaaaccacaaacacctggagttatatatagacctctgggattggtgcgcaagcgctgtgttgaaggagtgacaattatgctaaaaccaaaatgcaactgccgaaacccgggattgaaccagggacctttagatcttcagtctaacgctctcccaactgagctatctcggccaccgtgatcctactgcttttgtcatttcttcaaaatacagaaactgccatttgtagggtcagtgtatcttccaacgcctaattctgttgtcttcaatatcacccgtcattcactcacctcccctccacccaagaaatataagttctgctgcaatttatgtgtgaaataggatccaattttccccagcaaaagatgggaaagaaaaggcgaggaataggtcaaatgaggaagatactcccatgcttggtcaccgtataaaacactgctcagaaaactaaggaattcaaaatgaaattatgtaggcatttccttttctcttttttcggattttctttttctggcttgctcttcaatggcatgtcataaaggaacagaagattagtggacactttaacacggtagtgggcttatagcttccgaaaaaagacatcctgagcgaggtagttctttttttctattttcttccttttaccagtcttgtgctcacacatccaccttgggtggtacggagacccagggagtgaaaatggaaagtataatatgtttgtttgtttgtttctttgtttctttgttttgagatggagtcccgctctgtctcccaggctggagtgcagtggcacgatctggacttagtgcaacctccgtctttcaggttcaagcgattctcctgactcagtctcttccagtaggtgggattacaggcgcgccccaccacgcccagctaatttttttgtattattagtagagacgaagtttcaccatgttgatcagtctggtctcgcctcggcctcccaaagtgctaggattacaggcttgagccaccgttcccggcctattccttggagttcagagaattgtggtctgcacattgatgcataagaattgtttttttttttccagctgggtgcagtggctcacgcctgtaatcccagcactttgggaggccaaggcgagcagatcgcctgaggtcaggagttggagaccagcctgtccaacatagtgaaaccccatgttgtctctactgaaaacacaaaaattagccccgcgtcgaggcgcgcccctgtagtcccagctacagaatctcttgaacccaggaggcagaggttgcagtgagccgagatcacaccactacactccagcctgggtgacagagcaagactccatctcaaaaaaaaaaaaaaaaattgctttttacatacacatctgtaatcatgagattgtatttatttatttttattttgacagtgtcccactctgccagactggagtgcagtggcaatctcctctcactgcaactttcacctcctggctcaatcagttcttccacctcagcctagaagttttatatcaattcaaaagtgtcaagacattggactcctcttgataaataacttaagaacaatttaagacgtttacagaatttcagaaacagttctctctggaatgagggaattgctatggccaataattacttgcaaactgaattttaataaaaccctctctatgtctggacagttttcaaactgagtctcctattctgaaagagtcaaggctttcagttttagccaaaatttgatggaagggtcgataagaaattgttcttgaagccaggagtggtggctcacgcctgtaatcccagcactttgggaggcagaggcgggtggatcacctgaggtcagaagttcgagaccagcctagtcaacatggtgaaaccccgtctctactaaatgcacataaattagccaggcatggtggcgggcgcctataatcccagctactcaggaggctgaggcaggagaatcgcttgaacccgggaagcagaggttgcagtgacccgagatcgcaccactgcgctccagcctgggcaacaagagcgaaacttcgtttcccccccaaaaaattgtttctggatgattagatgatttcctaaaaattaaataaataaaatttataaaattatgttcgctttcagtctttgtcttgtcctcccgcttgtaaggtccgagccttctcagacaggaaacaacattcctctgggtttatcccctccgcctcacgtctctccccagctgggcgcagcctcagcctatgctgcagaaatgttaaaagttgaacatacagagaggaaaaaaatggaacgtgatgcggaaattaaaacagcagctacatataaatctcaacacagtgcttaaaatgtgtgtaaatggttctaggactgcgctgcactattgtgaaaagttcattcagaagtaaatgggagggaaggtggagaggagctgagcgccagctggcggagagagggaaaaggaggggtgccgtgaagtggaggaagaaaaacacaaatgggagagagatagagggcaaggaaaagcatccttaagatgattcggacttggatggacgggaccgtagagtgaatctaagcgccacatctctccgtcgcttcctctggccgtgagggaagagaggtgtccctagggaggtaggctggaccaggaaggagacctggttcgtttcgcccaggctgtcacggcttcaagagcgcctctccgctatttccgtcgctcgacagacgggctgagctctttggagtgatgttgggttttggtttgcgcctcaggaaccgctgataccgtagcttctgagggagcttcagggattgcctggcttcctaagtgcccgtgttgagagttagaagcgggatctgccggcagctaagagactgagcatgacggcggaaacatctaattttattagtttttgcttaaaatgcaaaagatgagaaaaagttaccgtttctttgctccatatatatctcctagaataaagccaatcgaaagccaacttcaccctaaagaaactcttcctggcgtttgcaacgagctcctttactcctaacgtccagctcttggctcaggacctgcagagcgtcacagctgttgcagaaaggcgaagtcgaggtacaatcggtgttaactacgtgtgcagccaccgtcttcttagtcctgttacaggtgcagaggcaatataagtgaaccactcacaagtcgtgtgggctgacctcagattgagtttagcgatgacttgtgaccacctggtagatggtggaccgttacagcatttagaaagtgagtaaaagaaaggatgcatacggaagcccacacgcttgcttggctcctgcagatggatagaggtcacttttctgccttctgggtgtttagtaacttatttttttttttgctttgttggcatgaaataaagatgaaaataaaagcagattttcttttaacaagttagtattaacatgcttgcagagtatttccctgtggatttctgcttagtactgtaataccagaatcagaaactctacaaagagctctctaatctggaggtatgggttgttccctagcttagaaggaggttatttctggagagtaagtacaatcaggtagaaaaggatccgttgggcttgggagaataaacgttcattacttttatttatgaaaaacaacaaaatgagctttctcctatactgatcttgtttcctggagttcagagtatttgcatctcagaccagaaacttccttgaggacccagagaagtactttttacttccaccaaatttcagctgaggtgactgctatcttttcatcatttgccttgtgtttgtagttaaatagtttaagtttcaaactatgtgggtctctaatggaaaaagtgaccaccagcacatcaaatcatcaaccaccggcagtgtaatcttttagtgaaagcttgtagggcttctcaacctggttagagggagttagaagaagaaacagaaaaggacgtgagcctttttagcttctgatctgaaatcagacttgggccacacagttctatggtttctgatgatttcatttacaactagaaattggttgcatggccaggaatactgcttgcttccctcgtgcgtggttcatgttagtgattggtggactgcttagaaaatataagtggataatcctaagcagcaaatagattcaaaggaataaacacgagtcacctctgtgtatgagagagaaatgcagaggccaacacaattcaccttgacagacagaaaaatttaaagttggggaatatcatggaccgcttctcactagtgcccggggaagaaaacaaaacctggaggtattggggattgaacccaggacctcgtgcatgctaagcacgcgctctaccgctgagctataccccctctggaagacttgccttttagagaatattttgatgactattattgtctgagtctgggctctgtgtcatgataatctttatgttttcaattccactctcaatttcctacaggaagtgtttcctctcttaggccctgctacaccaaaagaaaggtagcttaatagtacaaataaaggcactgttcctgatttgtggtcagtccaagatcaactcaccccacggtgggctccccatcgcgttagatttcctggagcatacttgcattcaatcatttgagtgtgtcctggcatacaacattctcttgcaaattttctgattataatgttctgtattcttttgactcttggaagcgtgttagtctcacatggtcaaaaaataaaactgactcaagtgtgtgtgaaaataccctaaaattcaacacaaatagaggcaaattaaaactgcattgtgaaagaataacataaccccattgaaataactgatttaagaaaatgcttgacaaagttcgttgttctaattgtaagtacaaaaagaagaggaaacaaatcttaaactctatgtatgagggttttttttttagagctaaggctgcaggaattctgagattttgtgtgaattttaggattgggaaaatgagtgtgtgtgagcgcgtgtgttgttggaaacaggctgtcactgtaagagaaagcaggtaaagaatagtcctgttggtgttgatgggaattggaggcatcagtatgaaattatacatatgtaattgtataggccgggcgcggtggctcacgcttgtagtctcagcactttgggaggttgagacgtgtggatcgcttcaggtcagaaatcgagaacagcctggccaacatggcaaaacgccgtttctcctaaaaatacaaaaatttgacgggtgtggtggccgcccctgtagtcccagctattcgggaggctgaggcaggataatcgcttgaattcgggaggcggacgttgcagcgagccaagatcgcaccaccgcactccagcctgggcgactaagactctgtctcaaaaaataaaaatagtacattttccctacagatctgtctgctaactgagcctggaagaaataccttagaaacaatgagcaagatgactctatattttgattttcaaataccattctctactaaaaggaaccagagatactaatagaaagtagctactagtgtcaactacactgactccaggactgtgccagggaaactacaagatgaacctaaaatatcttgctgtgccagaatgatggggatgatttaaaagaacacagaagctccggggtggctcacgcctgtaaacccagcactttgggagaccgaggcgggcggatcaccagaggttaggagttccagacccgcctggccaacatggtgaagtcccgtctctactaaaaatacaaaaaatggcctggcatggtggctcatgcctctaatcccaactacttgggaagcagaggtaggagaatcgcatgaacccgggaggcggaggttgcagtgagccgagatcgcaccactgcactccagcctggacgacagggcaagacctgtctcaataaataaataaataataaagtacatgagaaaaataatagtgtgtgtgtgtgtttagccgtaaagagagaggagaatcattgtggcaaaatatcgggaattggtaaatatgagtaacttgtgtgtggcagttctttgtatcatttttgcaacttttctgtaggtttgaaataatttcaaactaaaaaggtttttctaaattctcccttctcaaatttcttttccctcttccttcaagggctgtactcttctatcaagagtaacgtagatggatactaaaacagaagggtcagtaccgtctcgggggatttaggtgcaggtgaggaggtgagaaagtggaattcccagctcttagaaacgaagacccaggagcgtgggtcgctgcccgtccttaccctgccagcgcctgggccagcaccatggtcgcgaaacccagcatggatttcgtcttggggacgctatggctccagttctgacactcaagaaacgatggatggagaggagaacgaggaccaccttcgaaaagagttcgagagggaagcagggacgcggtggggtgcgcacctgcggcggcggcggcaaaggcggaggagaagcgaagtgggcgagcgcccgaggctgccagaggatctgggtgggccggaaggcggagtgcagcccggaagcccatctccgctgcttttcctcgctgtccgcgataagcgagagggctcattccctgttggagaagtgagctgaaaacactttcctcgcaagatctccctcgttttgctcaaggcagtcgcggcgttgagaacgcctcgcagctcctttactggctggggcactggggagaacgggtacccttgagttttggtacaggcgggtggtattagtggcttccaaggaaacgacagagaagccgcctatttccaatccctactgttagcgagggggagagtgtttaaccgggaagagagaccctcccgctgaagcatagggtcctttgttatagataggaagagtgttctttgcttttgtttttgttatagcttgtcaagcttggaatacaaggcatgaaaaacaagaaaggtaaggcagtcccagtatattttaaacttacgagggttttcagaaggagtactaccttgtttttatggaattcagggtgtccagatttcaacctacctagcagagtgaagctctatgagtctaatatcttggctttcttccacatcagcaagcctctgaaattcgggtttctttctggacaatatcacctacattttgcagtcggctcctatattgcctgcatccaactcgtggaagcaagaacagtgggaaaagccaaggttaccacataaaagaagatccttacatgagacaagtgtaaataaagcagcagctgaggtgtgtgtagaggaagagacaaacgtgaaaatgtagaaagtggatacagaattttttccaaggaggaagaggaatggtctgctcacaacgaggaactctctacttactgctgcaaagatacttttattacatttcatgcatatgctggattttaacaaccagaacattggtagacttggtgggggctggagagacagcagtcactcccaaccctgaggatgagtcctcaccctgagggtggagagaaaatgattactctctgccacagggcttagaatcgtccaagcctgggtttcaaattgcaaggcccaaatagcttgagagagctccaggtatttcagctcaaaagagtctcctggttcaagagaattcctgtgagttcctccacaggaaaatcagtctgttgtgtgtgacctgaaaagttgcataaatattcaaagggtcaaagaaatggtaaattcaaccccatccctgacataagacgaatacaaacctcactggctttcctaggtttgtgtttttgattgagaataggcagggaaccccaggaccaactcttcctcctcagcaggtgcctgaccctgggacttcctgaaacttctagagcagtgcttcacaaactttagcatcagagtcacttgaaggcttattcaaacacaggaggctgagccccatccatactcagcagttctgattcaatagacctaaggttgggcctgaaatttattattctgattgcagcaccctaatcctccaccccttgctctcctatgcagtgtccactgtggctaacatgccactgtttgcctggagagaaccaatggataccaggaaattaaagaagaaaaagtatgaaacaaaaagaaaatacatggcatgtgtgtattaccttcctccaaaaaatgtgtctcaaaacaaacatatgattggtctggaggcacacacacagccagtcctcagctaagcaggtttcatcagacagtatccctcctggatgctggttatagatattctcactggacaaaagaatcaagtaaggtcatgttagcctcatagagtgtatctatcatgccagcctgataggctggtggactaggaacaaacatcatactctcttgcctctcaaagacactttaattcaataggaaatatgtacagagagaacagcagttttgaaaccatacaccgttggaaaccataaaaggtttcatgagtgcataggatttcttgggagttccctctccaaaaaaagcgatgtaatcaggtggatcgagaaagaacatgaaatgtttgtttgttttttcccaaggcaggaagtgcccaacacacctgcgatctacttatcttttagtctgcatgtattttgcattgtgacagaaaaccttttcctagtttttcatatggggcctccgtttgctcttaccagaagttcccaggcaatattttattgtaaagaggaaaatggagtgactgaggaaatacaggaatacaaatcagtcttatggaacatcagtagggaatgttgatccgtattggtttctgcttctcgcacgttgaaggcctctaattccccgacagtcttcgtgtggttatccagcgccctgccactcccatctcaagcgactggagagccacagcccttgtctcagtactggatcacactggtagctgtgttctccgcgcaggtagacagggagagactggtggagaaatcagtgaacagaggctttcgctctgttctttggcccagaaaacaaaaataacttaaaaaaaaatagatgccttcagggcgcttttctcccttctcctttgtctttgcgtctcattaatcatagtacaaaatgggagtgaaagcgagccgcctgtgaatgtgcacgcttttgtttgggttcaagagaccgtgttgcgatcccgttcttctttccccctcatttcttgtttgtctcccttctgctgtggcaatcgcctttggtgatgtcgaggttcacagcataaccagtggagatagttcaaggctgaacattgggctacacttttactgtctatatgtgcagaaataggatagaaaaacgtgaggaggcagaagtctgtcgcttgaaaactaccagagcaaaaccatcgcttggaggtgtcggggatcgaacccgaggcctcatacatgcaaagcatgcgctctaccactgagctacacccccttactataaggtctctttgtaataattttcaggaggtaactttcatttcctgagactccgtgagcatgctggtagtagtggtcagtattatggagtgcggagagctgttctgagcaggagatacttggtactaatgggggatacagattctttagaatactgtgtaggacttgaaacgaaaaacgaaagattagaaaagtgtcagataataaccacaagaagtttccattgtggcctcaagacgttgagttcttagggtctccttctattatgcttggcaagaatcaagttcaggttttcgtttcttttaatttctcccagatacgacacaaagccattgaaattcagccttttcctgcctaaaacgcttcataattgttgtttgctcaatcggaatattaaagataagatttgatggaggaaagccacaatcagaagaaaacctgacagcgatgcacttagcattttttcataagggtccttagctggcgtggtgtcttacgcctgtactcccagctactctagaggctgaggcacgaggatcgcttgagctcgggagttagttgttgtagggagctatgactgtgccactgtcctccagcctgggcaacagagagagaagggaaggggaggggagggaaagggggagaagaggggagacgaggggagaagaggggaggggaggggaagggattcataaggcgtgaatgaaaaacagctatggggatggagagaagggttgaattatgagaataagaccgaagataaatacaaacagggttgaagaatgctttagaaaaacaaacacagcaggtgcagaaaaggggagaggttttaacagctcttttaggaatgagagatagactggaagatggagaagatgagttagtttggctcatactcaatttaaagtatctgtggggcacacttgtgaggatgtttctcagagaattcaggcaattaactctgtctctagcctgggatttgtaagcattaatagtagtagacacattacatggaggatggataaagactaaaaaagtgtactttgagatatggaaattacaaacctattcgtgatatttgtagtgaacaaacaagtttgtttgttcttgaattcaaaagttcttgaatcttgggacttatcgtgtgtcctttgaattacataagaagatgagaagaaaacctatttctcagcaccaaatttctagtgactattaactctttctcattctggtttgcctatataagagcctttgccaatgttaataaagtaacattgatggctttcaaaattgccaaattgcaagttgtatgtcagacttggcttttcagttggctgatgggatttctagaataaaaataggaaacactgagtgatagacttcactgaaggagaaactagagaattgttatagacaaaattgatgtgtattcatgtgtgtttgcctgcctgactgtgtctgtgtgtgtgcatgtaaatgatgggaaggattatcttggctctttgatgctgtaaaagcaatattaggacagtttgcagaaactctccttcatctttatgttgtgttacacccagagaaacttggctgtctattggattcttgggaattcataataagaaggttgcctcataaaaatgggagaattttaaataattaaatatctgtagctatcttcagactatctaccagcaacacgattgaaacatgttttttgtgtgaaatctgtaggatgagctcatttaacatagcattcttctgagaaattaaacatttaattttgaagacagaacaccctgtcatacacactcaatttcgaaaacctaaaaatatataaagtatatgtttaaatctgcactgtccaatatggttaccattagccacattgggtattgagtactgaaaattgcctagtctaagttaagatgtgttgaaagtgagaaatatataccagatttcaaagatgtaatttttttttcatggagtctcgctctgccacctaacctggagtgcagtggtgcaatcttggctcacagcaacctccacctgttgggttcaatccattctcctgcctcagcctcctgagtaactgggactacaggcgcgcaccaccatgcctggcaatttttctttttctttttttttttttttagtagagacagggtttcaccatgctggccaggctggtcccaaactcctgaccttgtcatctgccctcctcggcctcccaaagtgctgggattacaggcatgggccgccgcacctggccagatgtaatatcattttttaaacataaaatgtctcactgataattttaagattgattacttgttaaaataatattttggacatgcaaggtgatttacatatattagtaaaactggacataaaagatggaaacaatagacactggggactactagagggggaggcgagaaggggaaaggcttgaaaagctaactattggatactatgttcaccacccaggtgatgggattaatctcaccccaaccccagcatcatgcactatacccatgtaacaaacctggacatgtaccccctgaatctaaaataaaagttgaaattattattattagtattattattttgagacagagtcttgctctgtctctcaggctagagtacagtggcgctatctgggctcactgcaaactcctcctccaggtttcaagtgattctcctatctcagactcccaagtagctgaaattacaggcatgcaccaccacacccagctaatttttgtatttttattagagacagggtttcaccatattggtcaggttggtcttgaacccctgacctcaggtgttccgcgcacctcggcctcccaaagggctgggattacaggtatgacccaccttgcctatctaaaagttgaaattgttaaaaaattatataaaataagtattgcctgtttattttttaaatgtgactactagaaaatttaaaactacagaagtggctctcatttaagatttgtattaacttttttaaaaattctttttatcccagaagctaaagcagaagacttgtagtatcttttgattggacagcattgtctagagacgatgttatctatttaggtgctgttctgggagaatcccagagccaaaggacatggagcatggtctgccagtaattaggtttcatgccgcgagtggacttgactaaatgcatttccatgcatgatctccttagacctttgcaacatcccattttacataatcattattagcctcatttttaaggtattgaatgagagacgaatcatgcttagaattaccctaggcgtttcatttcaacaaaatgtaaaggaatcactactgtgctaggcaagaaaacattcaatcctgccatttgtctaatcaaatgtttccttttttttttctttttttaagacagagtcttgctcttgttgcctagggtggagtgcaatgttgcgatcttggctcactgcaacctccgcttcccgggttcaagggattctcctgcctcagcctctcgagtagctgggattacaggcatccaccaccacacccagctaatttattattattattattattattgttattattattattttgtatttttagtagtgacagggtatcaccatgttggccaggcaggtcttaaacttctgatctcaggtgatctacccgcctcagcctcccaaagtgctgagattacaggcgtgagccaccacgcccagcctatcaaatatttcttaatgaaataaaacacaggcttctgagttgagaaagcctcagtgacttaaagggtaaagtatctgattcctagttcctgtacagtcaatgtccccaccctgaggttggtctctcatttggtaccaattttcctttcacaatttgatgcagttctgatgttggagtactgtagtttattgtctcctcacacagtatgcaggtgttaggggaaaataacactgaaaatgaaacaccaatttgaaagaagaaaagatattaaaaatgaccaaaaaaaatcagacaaaaaaaaaaaaaaaaaaaaacaggacaaaaaaggcccattatcccaacacaaaatttcaagagaggagttgaagtaaaaaaaaggaaaatggggcacatccacctgagtcttgacagaataattaatttagaaatacttatttttgactggacgcagtggctcacatctataatcccagcactttgggaggccgaggcaggtagatcacgaggtcaggagttggagaccaggctggccaacatggtgaaatcccgtctttactaaaaatacaaaaattagtcaggcatggtggtggacgcctgtaatcccagctgcttgggaggctgcagcaggagaattgcttgtgccggggaggcggaggttgcagtgagctgagatcgttccactgcactctagcatgggtaacatagcaagattctgtctcaaaaaaaaaaaaaaaaagaaaaaagaaagaaagacttatttttgttctttcctggataccaatgaggaaataacttaagatttggaaattctaggcaaggtttccaggctaaagaaatgtcctgtcagtaagaaacttaaaaatattcctgtaattaggactggtgcggtggttcccacctgtaatcccagcacgtagggaggcagaagcgggcaggttgcttgagcccaggatttcaagaacagctgggggaacatggtgaaacccagtttctacaaaaaaaaagtacaaaagagagagagagaaagccaggcttgttgttgcatttctgtagtctcagctacccaggaggctgacatgggaggatcgcttgagtccagggaggctgaggctgcagtgagctgtgatcataccactgcactccagcatgggtgacagagtgagaccctgcctcaaaaaaacaaaacagggccgggcgcggtggttcacactgtaatcccagcactttgggaggccgaggtgggtggatcacgaggtcagtagatcgagaccatcccagctaacatggtgaaaccccgtctctactaaaaatacaaaaaattagctgggcgtggtggtgggcgcctgtagtcccagctactcgggagcctgaggcaggagaatggcgtggacccgggaggcggcgcttgcagtaagccgagatcgtgccactgcactacagcctgggcgacagagcgagactccgtctcaaaaaaaagaaagttattttcccagcagtttaactgcagagctatggagttgactcaagatacaaaccgaggtgtttctttctttttttttttttgagacggagtgtcgctctgtcacccaggctggattgcagtggtgcgatctcagctcactgcaagctccgcctcccgggttcacgccattctcctgcctcagcctcctgagtagctgagactacaggcgcccgccaccgcgccccactaatttttttgtacttttagtagagacgggggtttcaccgtggtctcgatctcctgacctcgtgatccacccgcttcggcctcccaaagtgctgggattacaggcctgagccactgcgcccggccaaaccgaggtttttggaattgcaaaatgtttcttgaatataccactaccacatatatacactcatacagcataatagttcttctacaggtttcttcatagttcttgtgatttaaaacacccctgcccaacacacataaataacatcaaatcagaaatgaattgtaattgccacagtctatagcatattggaatttcttaggttttaaaattagtaactttctagatttaagattttaaataatttacataccatcagttaacacttcatggaagacttcagtggagagagtgatacaaatatacatacatatatatatacattacctttatggaattttcaaaaagcaaaaaatgggagttatatatagacctctgggattggtgtgcaagtgttgtataaaggaaagacaattatgcaacaaccaaaaggtatctgccgaaacccgggattgaaccagggacctttaagatcttcggtctaacgctctcccaactgagctatttcggctactctggagctgtcccgttggtcatttcttcaaaatataaaaactgcaatttgtaaggtcagtgtatcttccaacgcctaattcggttgtcttcaatatcacccgtcattcactcacctcctcccaatccaaaaatataaattctgctgtaatttatgtatgaaaataggatccaattttccccggcaaaagacgggaaagaaaagacgagacggccgggcacggtggctcacgcctgtaatctcagcattttgcgaagccgtggagggtggatcacttgaggtcaggagttcaagaccagcctggccaacatggtgaaatcccttctttacaagaaatataaaaattagccaggagaggtggcgcacgcctgtagtttcagctacttcggaggctgaggcaggagaatcgcttgaaccagggagttcgaggctgcagtgagccgagatcgcgccactgcactccagcctgggcgacagcgagactctgtctctaaaaaaaaaaaaaaaaaaaaaaaggcgaggaataggtcaaatcagcaagatagatgctcccatgcttggtcaccttggaaacaccgctcagaaaactaaaggaaactatctaaaactaaaatgaaattatctagacttttccttttctctccttttggctcttttttgttttgttttctgtcttgctcttcaatgacatggcaaaaaggaacagaagattattgaacacgttaacctggtagtaggtttatagcttccgactgaagaaatcctgagcgagccaattctttttctctgtttccttccttttactgatctagtgctaacacatccaccttaggtggtacagagagccaggggtggaaaaggcaagcatatgtttattttagtgtgaccacgctatatatatatatatatatatatatatatatatatatatatatatatacatacacacacatataaatatgaaatatatataaattaaaaatgtaaatatattgttgatatagatattatatataatataaaatatacatgtatctctctctctatatatatatatagagagagagagagagagaagattccagcgagtgagagagagagagagagagacagggtcccactctgccagcctggagtgcagtggcaatctcctctcattgcaactttcgcctccaggctcaatccgttctcccacctcagcctagaaattcttatatcacttcaaaagtgtgaaaacattggactcctcttgttaaataacttagaaacaatttcagagtttaccgaatttcagaaacaatcctctctggaatgaggaaatagctacagccaacaacgacttgcaaattgaattttaataaaaccgtccctatgtctggacagttttcaaactcagtctcctattccgagagagtccaggctttctgtttttagccaaaatttgttgggagggtcaattaaaatattttttgaataatttcctcaaaaattttagattctcttacaggcttttttctttttttctctccctcttgtaaggcccgaacctccccagacaggaaacaacattcctccaggtttatccccgccgcctgacgtctctccccatctggacgcagcctcagcctatgctgcagaaaacgtttgaagttgagcatatagagaaggaaaaaaaaaaaaaggaaagtgatgtggaaattaaaacagtggctacatataaatctcagcacagtgcttagaatgtgtgtaaatggttctaggagtgcactgcactattgtgaaaagttcattcagaagtaaacgggagggaaggtggagaggagccgagggccagctggcggagagagggaagaggcggggtgcggtgaagtggagaaagaaacataaaaagggagaggggtagaggacaaggaaaagcatcctcaagattattaggatttggatggacgggatgttagagtgagtctaagcactcacctctccgtcgcttcttctggatatgagggaagagaggtagggaggtaggctagaccaggaaagggacctggttcttttcgtccagactgccacggctgcgagagcgcctcgccgctctttccatcgctcgatagacaggctaggctctttggaggagcacgtgatgttgcgttttttgtttgcgggttcgggaaccgctgatactgatagcttctgagggagctgcagggatttcccgatttcctgagtgtctgtgttgagagttaaaagcggaatctgccgacagcttcgagactgagcaggacagtggaaacgtctaattttattaggcttgaaatgcagaagatgagaaagaaagttcccgtttgtttgctccacatgtttcctttagaatgaagccgattggaagtcaacttcaccctgaagaaattcctcctggcgtttacaatgagcttctttactccccaagtccagctcttggctcaaaagggctctgcaggttggtacaaaggctgcggaaaggcgaagtcgcggtacaatcggtgttaactacatgtgcagccaccgtcttcttagtcttattacaggtgcagaggtaatataggtgaatccctcacaagttgagtgggttgacctcaaaattgactttagcgatggcttgtgaccacctggtaggtggtggaccattacagcgtttggaaaatgagtaaaacaaaggatgcatacggaagccccactagcttgcttggcttctgcagatgcagagagaggtcgtttttctgccttctgggtgttgagtaacttaattttttatcttttgtttaaatgaaatagagctgaaaatagaaggcgatttccttttaacgagatagtattgagatgcttgcagagtatccccgcgtggattctgcttagctctgtgataccagcatcagaaactgtgcaaagagctctaatctggaggtgtgggttgttcagtagcttagaaagaggttattcctggagaataagtgcagcaggtagaaaaggatccattgggattgggagaataaaagttcattcattatttttattgatggaaaacaaagaaatgagctttaccctatactgatcttggttcctggagttccgagtgcttgcatctcagggcagaaacttccttagaggacccagagaaatatgttccccctaccaaatgtcagctgaagtgactgtgatctttttctcatttgtcattatatttgccatttattgtattcttgtagttaaatagtttacattaagttttagagtttgtgggtttctaatggaaaaagtgaccaccagcacatcaggtcctcagccactggcagtgaaatcttttagtgaaagcttgtagggcttctgcaacctgggttagaagaagaaatacaaggccaagcatggtagcacacgcctgtaatcccagcactttggaagtctgaggtgggcagatcacctgaggtcgggagttctagactagcctgaccaacagggagaaacccccatctctactaaaaatacaaaattagccaggcatggtggtgcatggttgtaatcccagctactcaggaggctgaggcaggagaatcacttgaatccgggaggcagaggttgtggtgagccaagattgtgctattgcactccagcctgggcaacaagagtgaaactctgtctcaaacaaacaaacaaacaaacaaacaaacaccacacgcaggaaaggacttgcgccacgtggttctatggtttctgattatttcatttacaactagaaataggctggagggccaggagtagtacttgcttccatagtgcgtggttcaccttagtgactgctgggactgcttagaaagaataggtggataatcgtaagcagcaaataaccttaagtgaatgaacacgaattacctctctgtatgagagagagatgtagaggtcaacccaaatatcttgacaaggcaggacattctggacagctggggaaggtcatggagctcttcttacagtgccacagggaagaaaatggacctctggaggtactggggaatcagcccaagacctcgtgcatgataagtacactctctaccactgagctataccccctcatacctcctgtgtatttggaaaactggtgaccaccattatctgagtatgtgctctatgtcataaagacaattaccatgtgtttccaattccactgtttatgatttccctatatctaagtgccccctctcttaggcacggttacatcaagaaaaggtacgttaacagtaaaaagaaaaacactgttcctgatttgggatcagcaaatctatttccaaatagagcatttcaaaagtataacataaccacattgaaaattcaggaaagaattgacctaagaaaatggtttatacattgttctcattgtaaaaagaaaaagaacagcaagcatatcttaaactctatgtatcaggaatattttctgtaatgctaaggcaatagcaattctgatattttgtgtgaattttaggattggaaaaatgagcatgtgtgcgcctgtatgttgttggaaccaggctctcactgtgggaaaggaggaaggtaaagaatagtcctattggtgatgatgggaattagaggcatcagtatgaaattatacacttaattgtaaaatttctccacagatctctctgctaattgggcctagaagaaatgatacctcagatgcaatgagcaaagataattctatatattgattttcaaataccactccctactaaaaggaaccagcgatactgatagaaagtagctactggtgtcaactacactgactccgggactgtgccagggaaactacaagatgaacctaagatatcttgctgtgccagaatgtaggtgctcagaattgatgggtatgatttgaaaggacagagaagccagcttgaaagggatctcaatggccaaatctgacacattttgagcattaatgatgacaataagtgattatcaatcttgggaacttaaacacataaatatggaagatgggaagattttccttacagttgtgtgccaagtgataaatgtggaagtaaggataaaattagaaaatcctcatttgggctgggcgtggtggctcacgtctgtaattccagcactttgggaggccgaggcagggggatcacctgaggttgggagttcgagaccagcctgaccaacatggagaaaccccgtctctactaaaaatacaaaactgtggtgagccgagatcacaccattgcactccagcctgggcaagaagagcgaaattctatctcaaaaaaaataataataataataataaataatgagaaaaactgacatcacatgcctcttggtgtgatagagggtaacatgatttctgtgacatttccatgacctgaatgtaaccatgactacacaaattaagaaacattcaacaaaaccactggcatatgctcttcaaaaacatattcatgaaagacaagaagattaagaatctgttccaaagtgaaggagactgaaaagtcaagacaactagattcatatgtgattctgaaatggcacctagtttgggagagaaattcctataaaagattttattgatacaattaaaatttttatagactgtatattagagaatactattttatcaatgttaagttctctaaatttgataattgtgctgtggtaagaaattgaccttgttcttaggaaatacacattgaagtatttaggaataaaaagatataatgtctgaaaatcattatcaaatagtttagagaaataatttttgtcatatgtacatatacatatatatacacacacacatacacacacacacatatatattccactgttgctgattggttgttgaggtgaggaagaggcaagaccgtgttctgaaataatgtcaagatttggacgatatgtgtttctcaaatggttcccattccattttaaatgttgctaggctgagacaaagatacaaattccccaatttatattagaatttagcaggtagtttattttgttttgttttgagacagagttttgctcttgttgcccaggctggagtgcgatgggaggatcttggctcactgcaaactctgccacctgggttcaagcaattctcctgcctcagactcccaagtacctgggattacaggtgtgtgccaccactcccgactaattttgtatttttagtagagatgggggtttcaccatgttggtcaggatggtctcaaacccccaacctgaggtgatctgcccgcctcggcctcccaaagtgttgggattacaggcgtgagccactgtgcgcagccaactcctttataatcttataagaccaccgtaggatatgtggtctgtggtttactaaaatgtcaacatgtagcacattactgcactcatatcagatttttggcctccagaagtgtgaaagaataaatttctgttgttataagccatctaatttgagataatttgttacagcagccataggaaactaatcaatgacaagcttattctactctgccaactgccttgagtggttttgaggctcatgaagtctaaataacgtaatattgaaattaacatcttggcaaaattcaacagcccttcatgctaaaaactctcaataaactaggtattgatgtgatgtatctcaaaataataagagctatttatgaaaaacccacagccaatatcatattgaatgggcaaaaactggaagcattccctttgaaaactggcacaagacagggatgccctctctcatcactcctattcaacatagtgttggaagttctggccagggcaatcaggcaagagaaacaaataaagggtattcagttaggaaaagaggaagtcaaattgtccctgtttgcagatgacatgattgtatatttagaaaacctcatcatctcagcccaaaatctccttaagctgataagcaacttcagcaaagtctcaggatacaaaatcaatgtgcaaaaatcacaagcattcctatacaccagtaacagacagagagccaaatcatgagggaactcccattcacaattgctacaaagagaataaaatacctgggaatccaacttacaagggatgtgaaggacctcctcaaggagaattacaaaccactgcttaacaaaataaatgaggacacaaacaaatggaagaacatttcatgctcatggataggaagaatcaatatcatgaaaatggccctactgcccaaggtaatttaaagattcggtgcgatccccatcaagctaccaatgactttcttcacagaattggagaaaaactattttaaagttcatatggaaccaaaaaagagcctgcattgccaagacaatcctaagccaaaagaacaaagctggaggcatcatgctacctgacttcaaactatactatatggctacagtaactgaaacagcatggtactggtaccaaaacagagatatagaccaatggaacagaatagagccctcagaaataataccacacgtctacaaccatttgatctttgacaaacctgacaaaaacaagaaatggggaaaggattccctatttaataaatggtgctgagaaaactggctagccatatgtagaaagctgaaactggatcccttccttacaccttatacaaaaattaattcaagatggatgaaagacttaaatgttagacctaaaaccataaaaaccctagaacaaaacctaggcaataccattcaggacataggcatgggcaaggacttcatgtctaaaacaccaaaagcaatggcaacaaaagccaaaatagacaaatgggatctaattaaaccaaagagcttctgcacagcaaaagaaaccaccatcagagcgaacaggcaacctacagaatgggagaaaatttttgcaacctacccatctgacaaagggctaatatctagaatctacaaagaacttaaacaaatttacaagaaaaaatcaaacaaccccatcaaaccccaacaaaaagtgggcaaaggatatgaacagacacttctcaaaagaagacatttatgcagccaatggacacatgaaaaaatgctcatcatcactggccatcagagaaatgcaaatcaaaaccacaatgagattccatctcacaccagttaggatggcaatcattaaaaagtcaggaaacaacaggtgctggagaggatgtggagaaataggaacacttttacactgttggtgggactgtaaactagttcaaccattgtggaagacagtgtggcgattcctcaaggatctagaactagaaataccatttgacccagccatcccattactgggtatatacccaaaggattataaatcatgctgctataaagacacatgcacacgtatgtttattgtggcactattcacaatagcaaagacttggaaccaacccaaatgtgccttctatatgtaaggcacatgtccatcaatgatagactgaatttaacaaacgtggcacatatacaccatggaatactatgcagccataaaaaaggatgagttcatgtcctttgtagggacatggatgaagctgggaaccatcattctgaacaaactatcacaaggacagaaaaccaaacactgcacgttctcactcataggtgggaattgaacaatgagaacatttggacacagggtggggaacatcacacaccggggcctgtcgcggggtggggtgataggggagggatagcattaggagaaatacctaatgtaaatgaggagttaatgggtgcagcacaccaacatggcacatgtatacatatgtaacaaacctgcacgttgtgcacaggtaccctagaacttaaagtataatgattaaaaaaaaaaatcttaaaaaaaaaagaggccgggcgcggtggctcaagcctgtaatcccagcactttgggaggtcaagacaggcggatcacgaggtcaggagatcgagaccatcctggctaacacggtgaaacccggtctctactaaaaatacaaaaaaaaaaaaaaaaattagccaggcatagtggcaggcgcctgtagtcccagctactcaggaggctgaggctggagaatggtgtgaacccaggaggcggagcttgcagtgagccgagatcacgccactgcactccagcctgggcgactgagtgagactccatctctaaaaaaaaaaaaaaaaaaacagaaattaacgtcttggggtcacgtgtttacttctcatgtgacaggcaacgaaaagagagtaggacacctgaatgtgctttgtactaaggagtggtattaagaactcggaaactgaccgttgaaggttctcgggagctgaacctgaggcctcctatatgtaaggcacacgttctatcactgaactacatctcctcatgccaagagatatttgtgtcgtcctccaagtactattgcagtatatgaaaacaataaaaatatggaaataaaaaataacttaaaaattaaaaaggtggccgggcacggtagctcacgcttgtaatcgcagcagtttggaagttggaggcggtcagatcatttaaggtcagaagttcgaggccagccgagccaacaaggtgaaaccctgtctctactaaaaatacaaaaattagccgggcgtgatggcacgtgcctgtaaccccagctgctcagaggttgaggcaggagaatctcttgaacctgggaggtggaggctgcagtgagcggagatggcgccactgcactccagccttggggacagagtgagactctgtctcaaaaaacaaacaaacaaaaacccaaaaaccctaaaaaggtatttctccaatctaaagatgtaaaaaattaaataaaatgaaaaataaaggaatatctcgttatattctgtgggtctccattcctgtgttcattgttttagcactaagtgttgggtttagaagcaggatttgtgaccattttaagttggaagacccccagctgtgggggatattgaagttttggcaaataaagcttgaaatggaacgcagaatactggaaacttgcgttagaaaactgaccagctttttcctgaataaagcacttctgctattgctgtttgcttcacaggaatggtaagagcaaaactttgatgagaaaaccccaggtgagaatgaaaaccacatgcaacctgttattcattgccaaggggttcttgattgtactacagcatgaaggcaactgaggaggttcatggagtagcccagaataatgttcaagacatgaaataaatagcagattcaaggatggagaaaaactttgaaattttgaaagcacattcataggtagctagacacaggattcaaagacttattggatttatagagcaagccagaaagtggggaatccataaaagagagcctcaacaaacaggaggaaaaaaagcagaatagagatgcttattgttctttgaaggaatggacaagatattaggaggaggaggtgagtttgtttgggaacgtgttgaacttaccatattcttccgtaggatcctgcccattggtgaaacacagtgaacttagcccagtgctctgatctgaatacgtggaggtgggagtgagtagaaggcaccaatacagtgtgagtacaatgagaactcaaagtgtcctttgagatatgaagatcagaaacttacttactgatagttgtgaaaagcaaaaaaatgaacttcttcctagctgatcttcaaccctggaattcacactggttgtcaccatggccttgaaactttcacaaaagacccagaaagtctcatttcctggctagtttcccagtaggtgttatcttttctcattcatcttcattctcattctccttatgtatgactttacctatattggtaagcatattgctgagcccctttcgaggttgggaacaccttatggtttggcagaatttctctctgttggctcatagggatagcggaataggtaagaggaaacataatggcaggtttcactgaaattgggtatttaagtgtcacccacaaaactctacaagctctggtgtgtgtgtgtttgtgcgcgcgcgcgcgcgtgaaagtgctgggaggatgtgagaaaaattatctaggctgttttggccgggcgcggtggctcatggctgtaatcccaacactttgggaggccgaggcgggcggatcacgaggtcaggagaccgagaccatcctggctaacacggtgaaaccccgtctctacttaaaaaaaaaaacaaaaaacaaaaaattagccaggtgtagtggagggcgcctgtagtcccagctactcgggaggctgaggcaggagaatggcgtgaacccaggaggcggtgcttgcagtgagccgagatcgcgctactgcactccagcctgggcgacagagcaagactctgtctcaaaaaaaaaaaaaaaaaagaaagaaagaaagaaagaaagaaaattatctagactgtttgatggtgtgaaagttgtttccagagtcatcatgtaattattctctaacttgcacctgaagaaaccaagataccagttagattaccagaagttccccacaaggaggtgtttctttttttttttttttctgtttgccccaaagtacagagaacactgtgagaattgtttaagtttctgtaagcattcagaaatatctatgcatggggagacataggatgagttccaaatatatgagatttttctgatgaaccaaccatttatctcaggagatagaactcattcatactcaattactctgctcagggagcctgcagacatgcgaatgacatctctagacaatctacaaccagagagaagattgtaactggttgagtactgttttcttaaagttgacaaaaaggtggagtaatagttttcatgtaaggagctcttatatgataatctagaaattgaattcactctatattctttgggatttacatcttgatttgttgacagggagagggaggtttgattacactgttgtaagtctcccaccttgattgaatattaaaaaagaattcctgaactagacagtaaagggttaaataatcttttttcttcaattaaatatgtctttgaaaagaataaaactctaccttttgagtcagattgactacatggcctgatggattgtgtctgcttccatatcactgtgcagccaatggtcctgcccacctgccgcttcccacacattcacccagggtctcacgcatggccacgtcctcattcctctcagaagtccttaattttttttttttttttttgagatggagtctcattgtgtcacccaggctggagtgcagtggcatgatcttggctcactgcaacctccgcctccgaggttcaagcaattctcctgcctcagcctcccaagtagcagtgattacaggtggtcgccaccatgcccagctgatttttgaaagaggtccttaatttctctgtggagaaaaatttttttaaaatatgatctcattgaagtatacaaccccaaaataaaatatagttgaatttccaaaattcatctacaatgtaccttaaaatgattcactattgtcctaggccaaagataggcactgtttgctctcaaagaagtacttctatctgtcatatgtcatttgttttcattgtcccaagatgtttttgaaatctccatcctatattttctatagctttcttatattaaactcttggtttttgcatcctatccatttctaccctaaattacagaggtggacttccttaaagaagtctattgtggggagcagaaaaaaatatttccatttgggcctgagccctagcataaagcaatggtaataattcatgataattttcctcatgcttttactatattcctttgcaaattgattcccatgattgaagcctgtgaataatttttttctgccacagtgagtataagtggcaaagagacattgtggaactgtactttgaaaatgagagaagagagagaaaaaatgtcaacagaacagaaaattatctatttcccacatcaagaaagtctgggtcctcagtactaactctgaatctttctttaaagaagtaaactgaaacccaagacatcttaatctgagaaagaatgacttttggaacttattttctccattgaaaatttcctaatcacttcacagggacagaggtggcctgatattatatcggaaaccaaggatttcccaattcttgagatatccttcagctcacactttcattagggttagcaaagggttttggatctttaaaatctatcacagggcttagaatacaaagtggtgttaatacaaaagttcttgaagatttggtggtagctgatgagaagagggctgtgtattctggaatgattacaaggtcttattctatttaaaatgtttcagagcaaggatacaaacttcccagtttacattagaagttagcacagcctttattgcaaaacttgcgaaaaagaaaataaaggccgggagtggtggctcatgcctgtaatcccagcactttgcgaggcgggcggatcatgaggtcaggagttcgagaccagcctggccaatatggtgaaaccccgtccctaaaaaaaatataaaaaattagccgggcgcggtggcgcgcgcttgttgtcccagttactcgggatgctgaggcaggagaatcgcttgaacccgggaggcggaggttgcagtgagtcgagatcgcgccactgcactccaacctggacgacagagtgagactccgtctcaagaaaaaaaaaaaagaaaatgaaaacttcacatcatattcaatcatgaatagtgattcaaaaaatattactaagtacaatattgccagagaggcaaggaacagagtcaatgattagaacacaaaaatgattcagcaatagaaatatatattttttgcaattatgttttctgttagaatagaaaattgggggaaaaaacacagccgcgtatttatactatacacccttactccatccacgtcaaagcacgtcatattgcttcttaaatgtgcaaaagaatctcttgtggatcttgttaaattgctacttctggttcagtacgtctgaggtgaagctgagatttcgctcttctaacaagctctccggtgccaccaactcttgtgtggaccaagagtctgaaagatatccttacgatagagggcgcacctgtcttaggtaaaattacttctgtaacgtcatctaagggaagtcaaattatccggcaggagtgaagacagaataaaactggaaatcagtccgtgaactttgagatcttcagcagagcatgcttcccagtggagctatttcggcagaagtgtgacgcctctacattcattgatgaaaataactttctcaatttcccagtttggaaggctttgcgtttgtcagggctcagcctgcgatggatcatggctaaacaaggaccagaaaaaaaataaaggaaatcggctgggagcggtggtggcttactcctgtaatcccagcactgtgggaggccgaggcgggaggatcacgaggtcaggagatcgcgaccatcctggctaacacggtgaaaccctgtctctaccaaaaaaatagaaaaaattagccgggcgtggtgacgggcgcctgtagtcccggctactcgggaggctgaggcagaagaatggcgtaaacccgggaggcggagcttgcagtgagccaagatcgtgccactgggcgacagagcgagagactccgtctcaaaaaaaaaaaagtaataaagaaaattgagagcttacgtttttcttttattaaatatttccacatttatcttttatttcctactttttaaataacaatactccaaaggttaatgagctcgtcaatttggcgacgccattgaagttttggaatccggagccgtctttgtcttccagctccatcttttccaccttttgcttaggcagtcccccgagtcgtgtcaaggctgaggagtagaaatggaacagcactaatattaatggcaaaaccgttgtgaaatagggttactttctgtttaagcaaggaaaataaagtaaagcaatgggaaaaaaattaaaagcaaaaggaatggaggtgccggggattgaacccggggcctcgtgcatgctaagcacgcgctctaccactgagctacacccccgtactgaaacggttctctcgagagtatattcaagatcagaatctgacccttttgctaggtttcagaaccattagttgtaatcagccaaggtctattttatttagttatttctgatatctcaaatttaggttttgcgtccctctttgctgacagctgagcaaaccgcattctacaccgaaggccctctattgatggccctgggatttttctgctcgtcagtccggagtcacttaccgggcaccactagaagaacccgggatgaaacattttctcccgtgtcttgactctctcctttctttcaccgctgctttaaagggctgccagaaagccacaaagtacaaagcgaggcatttagagaccatagtagatgcaggtggcgagggaagacaggtggagaaacgcagacgggttcgtgtcggtgcagccactgctttggacccgagcctccgtcccgccgggggccggggtgctgagcccagcgaggcgcggactggggagcgaggaagaggagcacccgccagatcgcgccccctttcgggcagaatccgctcccggtccggtcccgattggcagaaaacgatacgagggcggtatacactcaacacgcgcatgaacgattcatcaagccctccgtgtgccgggtctggctcaccaacctcatcctctgagctccgggcttctgcctcccagcccaaggaacccacagggtctcagccaacactgggagagtagcttaaatgggcagaaagacaagataaggggatgtggtgaataacagaattatccaatcctattatcagcccatctgagattaaagggacgtcaatcatacttgaatactttatttaaaaaaaacagtttgcagagggtcgcatacaagaagaataaagtggttttttttttttcataaaaatgtggattcaggagcattaccggaaataatcaaggaacgaggaagagtgtggcgagagagttcgggtccggtatacctctctctccgcaccacattcttttgtagtacctgtgaaacattcatgaaaacggaccacagaagaaaacctcagtaagttccaaagtatagaaataacacaaacatcattctctgaccatcatgcaataaaactagaaattgataaaataaaaaataaaagtcacttccacctgaaaattttaaagcatgctataatacaactcgagtcaagaaggaaatacaaattttaattacataatttcttgaaagggacaaaagtgcaaatgtgacatagaatctgtgagatagagctaaagcatttatcagaaggaaatttatttcctcacatacctatatcgataacaaaaaataacaaatgaatcaaacacagctcaagatgctactaaatgaacaacaaaataaaccaaaagaatgaggaaggaagggttgtaaggacaaattcagagaatgagttagaaacaaagtataactaataaagatacaaaaaaggtggatatttgaaagtcaacaaaatagacaaacctctagccaacaaagagaaaattagtgcaaatacacaaaattagaactggaggaaataatcatcaacacagaagaccttttttgaaatcatcagagataacataacacaactagcaaataactggcaaacttagtggattttttagacaaatgtagcatactcaaactaacccttgtagagacagaaagtctaaacagaccagttaagaaaaatagtttaacaggcatactcaataaaaagggcaccaagctcaaatactttcataaagaaatcctaccaaactgtcaaatatcaaaaaatcatgatgctacttaaattattcgaagcatagacactagcactttataaagttagtataacatttcagtttgcactaaaaatgaaaactacaggtcaatttcacatatgaaatatatgaaatgtaatgcctaaatcttaaataaaatttatagcaaacagaatacaatagcacatttaaaacagtaatacaggatgtccaagtagggtttattccaggagtgtaaagatcactcattattaggaaagatattaatataatccattgtaattggaactggaggtcattatgttaaataaagtaagcgagaaacagaaagacaaatttcacatcttttcagtcatatgtgggagtttaaaaagttgatctcatggaggtagagagtagaatcatagataccagggtcagggaagggtgtgtgcattggagctgcgtacaaaggcaggttggtcaatgtgtacaaacatataattagatagaaggtataggttcttttttttttttttttttttgagttggagtctggctgtcttgcccaggctggagtgcagtggcaccatcccagctcactgcaacctccacctcccaggttcaagtgattctcctgcctcagtctcctgagcagctgggattacaggtgcctgccaccacagccagcctctaatgttgatagtagagtagggtgactatagttagcaacaatgtattgtatatttcaaagtagctataagagataacctgaaaccaacacatagaaatgataaatactcaaagtgatggataccccaaataccctgactttactcataataagtgaaagacatactaaattagattggatagcatactttgttgtcaaggttgccgagaaattagtcttttcatagagtactggtgggaatggaaaatggtataattccaagggcagaaaatttgcagtatctagaaaaaatgtataattatttaccctttaacccacaaattccacttctaaaaagctatccctaatatatactatcaaaataaaaagggccaggcacagtggcttacgcctgtaatctcaacactttggaaggccaaggccggcaaatcacttgaggccaaaagtttgagaccagcctggtcaacacagtgaaaccctgcctctactaaaaatacaaaaagtagtcaggtgtagtggcgggcacttgtaattgcagctcctcaagaggctgaggcaggagaattgcttgaatcccaggaggcagaggttgcagtgagccaagatgtcaccacagcactccagcctgggtgagagagcaaaactccatctcaaataataataataataataaatactaaataaataaaaaggaaaacagatgcatgactattcatcacaactctatttgtaaagcaaaagaaggaaacaatccaggccgggtgcggtggctcatgcctgtaatcccagcactttgggaggctgaggcaggtggatcaccaggtcaggagattgagaccatcctggctaacatgatgaaaccccgtctctattaaaatacaaaaaattagctgggtgtggcggcacgtgcctgtagccccagctactagggaggctggggccaagatcatgccactgcactctagcctgggagacagagcgagactccatctcaaaaaaaaaaaaacaaaaaaaaggaaacaatccaaatgtctgacaaaagggtcaatttgagaaaactatggtacatcaatataatgtcactgtaaaaaggaatactaaatgatcagcttcaatctctccttcccctatgaagaagggcatatatgtatttgaacttcactgggacactgggtaatcactctcctacaattaccccatgcttatgtatgttaaataaattttgtatgtctttttcttttattaatctgcctttgtcacttcattttcagcaaatttcagtgggcagagaggaagcttttccgccacccctacatagttaatactctaccttgagcatggcacacagagaatactaaggtgctaatagctcttactgcggcttgtgaggcagtggcttcaaaacaggaaatacaagccaagaggatttcagactactgcacttcatccactgagtgttcagcatctagaacttttcttccacaaagagaaacatgcaattgttaccacctctagctccagagtcctagctcagagatttttcctatagaaagaaatgagccagccgggcatggtggctcatgtctgtaatcccagcactttgggaggccaaggcgggcagatcacctgaggtcaggagtttgagaccagcctggccaacatggcgaaaacccatctctactaaaaatacaaaaaaaatagctgggcctggtggtgtgtgcctataattccagctactatggaggctgaggaaggagaatcgcttgaacccaggaggtggaggttgcagtgagctgagattgtaccactgcactccagcctgggcgacagagcaagactccatctcaaaaaaaaaaaaaaaaaaaagaagaagaagaaataaatgagccaaaaagtagatagcttccaatcctttcccaaaataactgatttaatttgtaacatagaatagagaagtggaaagctaagggcattctcaagaatggtggagattttgatgaaaggtaattgggaggaaatttgtgaatctaagaaagatagatcttaaactgcagtctggctagtatgcaggagagaatcaggaaataagacaggtaggaggaacccttttggagtcaggacaaatatcaaatacttacatcagaaactattccatttaaggagctacattttgattggatttgttcatagaggaatttatacctcaaggcattgttgaaaacaatacaacaactggtcagcaataactgaaacacaacagtagggtgtggtcagaaaaagagtgaaaaagaacattgccagcaccactgtcatcccagggtgactgggggcataccaaaaactgcatcaccacgaagactaatgtcagaggattagcactcttgggagtgaaatatccagggttatataatactccatgttaataaaatgaatggcaataatcaaatatcatctcaattgagatacagaaaggattcaacaaaattcaacacacttttatgaaaaaagcactcagcggccaggcgcgatggctcacgcctgtaatcccagcactttgggaggccgaggcgggcggatcacgagttcaggagatcgagaccatcgtggctaacacggtgaaaccccgtctctactaaaaaaaatgaaaaaaattagccgggcatggtggcagacgcctgtagtcccagctactcgggagactgaggcaggagaatggcgtgaacccgggaggcagactttgcagtgagcagagatggcgccactgcactgcagcctggtcaagggagcaaaactccgactcaaaaaaagaaaaaagaaaagaaaaaagaaaaaagtactcagcaaactaggaatagaatgaaactacctcaacttaataaaagccatacatgaaaagcccacaggtaatatattcagtggccttagcttttcctctaagatctagaacaaggcaaggatgcttactctcaccactactgttcaacatagcactagaagtcctactcagagcaattagacaagaaaaaaagccccagtgcgctggctacagcctgtaatcccagcactttgggaggccgagagggtgcactgcttgagcccaggtgttcaagaccagcctaggcaacatggtgaaaccccataaccataaaaatctacaaaaactagccgggcatgatggcatgcacctgtaatcccagctacttgggaggctgaggcagggttcacttgaacccgggaggtggaggttgcaatgagccgagatcacaccattgtactccagcatggggacaaagccagaccccgtcttgaaagaaaagaaaaggaaggaaagaacgaaagaaagaaacaaaagtcatccaaactggaaaagaaaactaaaattatctgtttacagatgacatgatcttatatgtggaaaccctgaagaccttcccacacacacacaaaaaaacctgttacaactaataaacaactttagaaaagtagcagggtataaaatgaacacacaaaaatcagttgcatttctacaaactagcaatgaccaacctgaaaagaaaattaagaaaacaatcccatttactatagcaccaaaaagaataaaatatttaggcataaactgaaccaaggaggtaaaagacttgtgcgggaaaaactacaaaacattgctaaaagaaatcagacaagatacaaataaatggaaaggcatcctgtgcttgtggagtggaagactttaatactgtgaataagtacatattatccaacgtgatctacagattcaatggcattcttatcaaaaactcaatggcaattttgcagaaataggaaaatatagaaaaaaatcatcctaagactcatatggaatctccagggaacctgaacagccaaaacaatcttgaaaaagaacaaagctgtagaactcattcttcctgattttgaaccatactagaaagcaacgctaatgaagatggttgtaggggccaggcgcagtggctcatgcctgtaatcccagcactttgggagaccaaggtgggtggatgacgaggtcaggagttcaaggccagcctggccagcatggtaaaaccccgtctctactaaaaatacaaaagattagctgggcatggtggcacgtgcctatagtcccagctacttgggaggctgaggcaggagaattgcttgaacccggcaggcagaggttgcagtgagctgagatcatgccaatgcaccctagcctgggtgacaggtgacagagcaagactctgtctcaaacaaaaaagatggttgtattactgacataaagacaggtatacagactaatggaacagagagcccagaaataaatccttgcatatatggatgaataattttgacaatgatgccaagactacacaatggagaaaggacagagccttcagtaaacagtattggaaaaagtggttatctacatgcaaaataatgaattggaccttatctttatacatatacaaaaaaaattcaaaatgggttaaagacctaaacataagaccaaaaactatacaactcctcgaagaaaacatggaggaaaagcttcaggacattggatttgacagtgatttcttggacaagccaccaagaacacagacaacaaaagcaaaaatagacaaatgggaccacaccaaacttaaaaatttccgcacatcaaaggaaacaatcaaaaaagtgaaaacacaacctatggaacaggaggaaaatgtttgcaactgataaagggttaatatccagcgtatataaggaacttgtacaactcaacaacaacaaaaaacaaataacctgattttaaaatgggcaacagactttaataaacatttcttgaaaaaagatatacaaatagccaataagcatatgaaaaaatgttcaacattactaatcattagagaaatacaaatcaaaatcataatgaaatataatctcacatctgttaggatggccctatgaaaagaatagaaaataacaagtgttggagaggatatgcagaaattggaaatgtgtgcactgttggcgggaatgtaaaatggtgcagccattatgaaaaacagtgtggagttcgtggtctatatacatatatatatacatgtatatatataagttataggttttcatccacagttactggttcataacttccatctcccttgttacagtcttttgttataatgttgtgtgtgttaggcctcaggggcaggcctcaaggaacagaatctacctcctgccttcctttcacctgccccaaggcagaactctaatattaccccatctttttcattatgggtcttaagaccctcccctgggagggtccagtctcataccctggaggaaggaatgcttccatacaaacccaagaagactgggttcaaagacctccagatagctgaacccgtgaaggttgctggagggtggcatgcccagggagggcatggaagctccataccccttccaccataccttgccctgccagtctattcatctgtgtcctttataataaactggtgaatgtaaatgtttccctgagttctgtgagccactccagcaaattaacttaacccaaagaggaggttgtaggaaccccaaattgaaaccagtcagtcaagaagtcccagagacccagacttgcaactggtatctgaggctatagggggaagtcttgtggactgagcccccaacctgcaggaactgacattaccttcaggtagacagtgtcagaactgaattggaggacacctagctggtgtctgctgcttgatgtgtggggaaaaaccttcacacatttggccacagtagtcttctatgttgatgattattgtggtgtaagactagaggaaaatggttggtgagagttttcccaacacagggtttcttcacaaaattaaaattatgattcccatataatccagcaaacctacttctgcaggggtttcaaaagaattcaaaagcattcaaagtaggatcctaaagagataactgtagcattattcacactagccaagaggtaaaagcaaaacaaatgtcaattgacagatgaatggatataccaaatgtggtatatacatacaacagaatattatgtagccttaaaaaaggaaatcctatcacatactacaataatagataaatcttgaggacattatggcaagtgaagtaagccagtcacaaaagaacagacactgtatgattccactaataagaagtatctaaagtagacacaattatagaaacagaaggtagaaaggtggttgccaaggactggctggaagggagaggagaattagcgtttgttgggcatagagtttcagtgttgaaagatgaaagtgttccagagatctgttgcataacaatgtgaatatacttaatactactaaactgtatacttaaaaatggttaggatgataaatttaatgttatgtgttttacttttatttaaaacaatttaaatacgttcagataaataaaaatgagttcagtcaggcgcggtggctcatgcctgtaatcccagcactttgagaggccaaggcgggcgaatcacttgacgctaggagttggaggccagcctagtcacaaaaccatgtctctacaagaaaatataaaaaattagctgggtgtggtggcacatgtctgtaatcccagctactggggaggctgaggcatgagaatcgtttgaacctgggaaggtgaggttgcagtgagctgagaatgtgccactgcactccagcctgggtgacagggtgagactaggtctcaaaaaaaaaaaaaagtacacaacagcacaacatatcaaaatgtactggatacagctaaaacagtgctaagaagtaaatttatagctgggaatgtttatgttaggaaagacaaaagatcttaaatcaatagcccttacattgtaagacactgaaaaaagacgagcaaactaaagctaacgcaacaggaaggaaagaaataaagattagagtggaaactaatgaaatagaaaaacaataaataaataaataaaataaaatatttatttcttaaaaaggtaaacaaaattgtcaaaccctaaactagattgaccaagataagggagagatgattcaagtcactaaaatcagaattgaaatggaaacattactgtggggcgcagtggctcacacctgaaatcccagcactttcggagaccgaggtgtgtgcatcacgaggtcaggagtttgggaccagcctggccaacatggtgaaaccccatttctactaaaaatacaaaaattaggtaggtatggtggtacccacctgtagtcccaactactcaggaagctgaggcagaagaatcacttgaacctgggagccgagattgtgccactgcactccagcctgagggacagagtgagactgcatctcggaaaaaaaaacaaaaaacaaaaaagaaatcccctgttagaagagaataaaatagagtgaaaacaagatggccaaataggaacagctctggtctgcagctcccagcgtgattgccacagaagataggtgatttctgcatttccaactaaggtaactggttcatctcactgggactggttggacagtgggtacagcccatggagggtgagctgaagcagggcggagcatcgcctcacctgggaagtgcaaggttcaggggatttccctttcccagccaagggaaactgtgacagagtgtacctggaaaatcgggacactcctgccctaatactgcacttttccaatggtcttagcaaatggcacaccaggagattatacccagagcctggctcagagggtcctacgcccacggagccttgctcactgctagagcagcagtccgagatcgaacagcgaggtggcagcctggctgggggagggggtcctccattgctgaggcttgagtaggcaaacaaagtggcccagaagctcttattgggtggagtccaccacagctcaaggaggcctgcctgcctttgtagactccacctctggggggcagggcatagctgaacaaaaggcagcagaaacttctgcagacttaaacgtccctgtctgacagctctgaagagagcagtggttctcccagcacggagtttgagtcctaagaagggacagactgcctcctcaagtgggtccctgacccctgtgtagcctaactgggagacacctcccagtaggggccgactaacacctcatacagccaggtgcccctctgagacgaagcttccagaagaaggatcaggcagtaatatttgctgttctgcaatatctgctgttctgcagcctctgctggtgatacccaggcaaacagggtctggagtggacctctagcaaactccaacagacctgcagctcagagacctgttaggaggaaaactaacaaacagaaagaaatagcatcaacatcaacaacaaggacatccacaccaaaagcccatctgtaggtcaccatcatcaaagaccaaaggcagataaaaccacaaagatggagagaaaccagagcagaaaagctgaaaatcctaaacaccagaacacctcttctcctccaaaggatcgcagctcctcaccagcaatggaacaaagctggatggagaatcactttgatgaattgacagaagtaggcttcagaaggtcagtaataacaaacttctccgagctaaaggaggcggtttgaacccatcataaggaagctaaaaaccttgaaaaaagattagacaaatggctaactagaataaacagtgtagagaagacctcaaaggacctgatggagctgaaaaccatggcacgagaactacgtgacacatgtaaaagcttcagtagccgattccatcaagtggaagaaagggtatcagtgattgaagatcaaattaatgaaacgaagcaagaagagaatttagagaaaaaagggtaaaaagaagccgggcgcggtggctcacgcctgtaatcccagcattttgggaggccgaggcgggcggatcacaacgtcaggagatcgagaccatcctggctaacacggtgaaaccccgtctctactaaaaatacaaaacattagctgggcatggtggcgggcgcctgtagtcccagccactcgggaggctgaggcaggagaatggcgtgaacccgggaggtggagcttgcagtgagccaagatggcaccactgccctccagcctcggtgacacagtgagactctgtctcaaaaaaaaataaataaataaaagaaaaaaggctaaaaagaaacaaacaaagcctccaagaaatatgggactatgtgaaaagaccaaatctacgtctgattggtgtacctgacactgacagggagaatggaaccaagttggaaaacactcttcaggatattatccaggagaacttccccaacctagtaaggcaggccaacattcaaattcaggaaatacagagaacaccacaaagatactcctcgagaaaaacaatcccaagacacataattgtcagattcaccaaggttgaaatgaaggaaaaaatgttaagggcagccagagagaaaggtcgggttacccgcaaagggaatcccatcagactaacagcagatctcttggcagaaactctacaagccagaagagagtgggggccaatatttatcattcttaaagaaaagaattttcaacctagaatttcatatccagccaaactaagcttcataattgaaggagaaataaaatcctttgcagacaagcaaatgctgagagattttgtcaccaccaggcctgccttacaagagctcctgaaggaagcgctaaacatggaaaggaacaactggtaccagccactgcaaaatcatgccaaattgtaaagaccatcgatgctaggaagaaactgcatcaactaatgggcaaaataaccagctaacatcatgacaggatcaaattcacacataacaatattaaccttaaatgtaaatgggctaaatgccccaattaaattagacacagactggcaaattggataaagagtcaagacccatcaagtgtgctgtattcaggagaccaatctcacatgcagagacgcacacaggctcaaaataaagggatggaggaagatctaccaagcaaatgtaaagcaaaaaaaaaagcagcagttgcaatcctagtctctgataaaacagactttaaaccaacaaagatcaacaaagacaaagaaggccattacataatggtaaaggggtcaattcaacaagaagagctaactatcctaaatatatatgcacccaatacaggagcacccagattcataaagcaagtccttagagacctacaaagagacttagactcccacacaataataatgggagactttaacaccccactgtcaatattagacagatcaatgagacagaaggttaacaaggatattcaggacttgaactcagctctggaccaagcagacctaatagacatctacagaactctccaccccaaataaacagaatatacattcttctcagcaccacatcacacttattccaaaattgaccacaaagttggaagtaaagcactcctcagcaaatgtaaaagaacagaaatcacaacaaactgtctctcagaccacagtgcaatcaaattagaactcaggattaagaacctcattcaaaactgcacaactacatggaaactgaacaacttactcctgaatgactactgggtaaataacaaaatgaaggcagaaataaagatgttctttgaaaccaatgagaacaaagacacaacataccagaatctctgggacgcatttaaagcagtgtgtagagggaaatttatagcactaaatgcccacaagggaaagcaggaaagatctaaaatcgacatcctaacatcacaatgaaaagaactagagaagcaagagcaaacacattcaaaagctagcagaaggcaagaaataactaagatcagagcagaactgaaggagacagaaacacaaaaaaccattcaaaaaatcaatgaatccaggcgctggcttttttgaaaagatcaacaaaattgatacatcaccagcaagactaataaagaagaaaatagagactaatcaaacagatgcaatgaaaaatgataaaggggatatcaccaccgatcccacagaaatgcaaactaccatcagagaatactataaacacctctatgcaaataaactagaaaatctagaagaaatggataaattcctggacacatacactctcctaagattaaactgggaagaagttgaatccctgaatagaccaataacaggctctgaaattgaggcaataattaatagcctaccaaccaaaaaaagtccaggaccagacggattcacagcagaattctaccacaggtacaaagaggagctagtccgatttcttctgaaactattccaaacaatagaaaaagagggactcatccctaactcattttatgaggcaagcattatcctgataccaaagcctggcagagacatgacaaaaaaagagaattttagaccaatatccctgatgaacatcgatgcgaaaatcctcaataaaatacaggcaaaccaaatcgagcagcacatcaaaaagcttatccaccaagaacaagttggcttcatccctgggatacaaggcttgttcaacatatgaaaatcaataaatgtaatccatcacataaacagaaccaaagccaaaaaccatgtgattatctcaatagatgcagaaaaggccttcgacaaaattcaacagcccttcatgctaaaaactctcaataaactaggtattgatgggacgtatctcaaaataataagagctgtttatgccaaacccacagccaatatcatattgaatgggcaaaaactggaagcattcccttttaaagctggcacaagacagggatgccctctctcaccacttctattcaacatagtgttggaagttctggccagggcaatcaggcaagagaaacaaataaagggtattcaattaggaaaagaggaagtcaaattgtccctgcttgcagatgacatgattgtatatttagaaaaccccatcgtctcagtccaaaatctccttaagctgataagcaacttcagcaaagtctcaggatacaaaatcaatgtgcaaaaatcacaagcattcctatacatcagtaacagacagagagccaaatcatgagggaactcccattcacaattgctacaaagagaataaaatacctaggaatccaacttacaagggatgtgaaggacctcctcaagaagaactacaaaccactgctcaacaaaataaaagaggacacaaacaaatggaagaacattccatgctcatggataggaagaatcaatatcatgaaaatggccctactgcccaaggtaatttatagattcaatgccatctccctcaagctaccaatgactttcttcacagaattggaaaagactactttaaagttcatatggaaccaaaaaagagcctgcattgccaagacaatcctaagccaaaagaacaaagctggaggcatcacgctacctgacttcaaactatactacgtggttacagtaaccaaaacagatggtactggtaccaaaatagatatatagaccaatggaacagaatagagccctcagaaataataccacacgtctacaaccatttgatctttgacaaacctgacaaaaacaagaaatggggaaaggattccctatttaataaatggtgctgagaaaactggctagccatatgtagaaagctgaaactggatccctcccttaaaccttatacaaaaattaattcaagatggatgaaagacttaaatgttagacctaaaaccataaaaaccctagaacaaaacctaggcaataccattcaggacataggtatggacaaggacttcatgactaaaacaccaaaagcaatgacaacaaaagccaaaataaacaaatgggatctaattaaactaaagagcttctgcacagcaaaagaaactaccatcagagtgaacaggcaacctacagaatgggagtaaatttttgcaatctacccatctgacaaagggctaatatccagaatctacaaagaactcaaacaaatttacaagaaaaaatcaaacaaccccatcaaaaagtgggcaaaggatatgaacagacacttctcaaaagaagacatttatgcagccaaaagacacatgaaaaaatgctcatcatcactggccatcagagaaatgcaaatcaaaaccacaatgagataccatctcacaccagttagaatggtgatcattaaaaagtcaggaaacaacaggtgctggagaggatgtggagaaataggaatgcttttacactgttggtgggactgtaaactagttcagccatcgtggaagacagtgtgataattcctcaaggatctagaactagaaatactatttgactcagcaatcccattactgggtatatacccaaaggattataaattatgctactataaagacacatgcacacatatgtttattgcggcactattcacaatagcaaagacttggaacaacccaaatatccatcaatgatagactggattaggaaaatgtggcacatatacaccatggaatactatgcagccataaaaaaggatgagttcatgtcctttgtagggacatggatgaagctggaaaccatcattctcagcaaaccataacaaggacagaaaacaaaacacctcatgttctcactcatggggggaattgaacaataagaacacttggacacaggaaggggaatgtcacacaccagggcctgtcgtggagtgggttagtggggagggatagcattaggagaaatacctaatgtaaataacaagttaatgggtgcaggataccaacatggcacgtgtatacatatgtaacaaacctgcacattgtgcacatgtaccctagaacttaaagtacaaaaaataagagaataaaatatttccccccttagacctgagccctgatagtatttatttatatttctgaccccctactacagcttcttacttttgacaattgtcctttttttttttttgagattgaggctcgctctgtcacccaggctggattgcaacagcgcaatctcagctcactgcaacctccacctcccaggttccagtgattatcctgtctcagactctcaagtagctgggattacaggcggctgtcactatgcctggctaattttttgtatttttagtagagaaggggttttgccatattggccaggctggtctcaaactcctgacctcaagtgatcctcccacctcggcctcccaaagtgctgggattacaggcatgagccaccatgcccagccaattgtcctttttctaacacaaaatacttccatggtctgagcaccgtgaatgaggctgtcaaactggaaaagtgagttaagctgagatgcagacctgccaaagtctcaaccaacaccatagggagcactggattacatatggcctatactcctgtggtgccaaaacgacaaatctttttactccactgcaatcaattgttgaaggtgcatcatcccaggaagggtgtgcttttgggagaatcaactctctgcacctgagataaaccctagaacattggcagcactccaaacaactaagggaaatgagtccttctttgagagggaatgtaggtggcatttctccatgtcttatatatctcagttattatttattcaaatattgcctctgctctattgtctttcatccattaaaaattctaattaaatatatattagatctccttatcctctcttctattaataccattattttgcatctccatactttgttctgaataattactttttgtttttttatgagacagagtatcgctctgttgcccaggctggagtaaagtggcacaatctcggctcactgcaagctccgctttctgggttcatgccattttcctgcctcagactcccaagtagctgggactacaggtgcctgccaccacacctggctaattttttgtatttttagtagagatggggtttcaccgagttatcatgatggtctcgatctcctgacctcgtgaaccacctgcctcagcctcccaaagtgctgggtttacagatgtgagccaccacgcccagcgtgttctgaataatttcttctaaattattttccactttactaatactcttttcagttgtgtcaagtttgttgttaatttatccttcaagttcttaattttggttattatatatttcaattacaaataaattttggtttttatttttaaatctacttcgtcagtttttatatttttcaatttgctccttaaattttttagattagcttttgtttctttgaatatagtaagcagttttgttacacccttatctgataatttccaaatctgaagtttagtagattctatttctggtatctgtcatttctttttctttctttcctttcttttctctttttcttttttctttctttctctctttctttctctctcttttctttcttttctttttttgagtctgttgtttctgttgattttcacggagacttgtttgttcatgtgtatgcacgtttgtatgctgggttttgtatttgaaaaaaatatttctagaaataatgtgaagtctaggttaaagttttattccttcagagaggattttcttttgcttcttcagaaacctagatgtgctgaaatacagcccaccttaaaccagtgtcaaggtttggggtcttatgggctaccagatgatggtaagccaagctgcagtttatgggtgagcaggtttacttacagttcccctttactcctagaaagcagcctcagggggagtgcatgatcaccaatgtcgccactttgggcagccctaggcttctgtttttgttcctctaaccctatgaggctatcagaaacatagataagtctcttggcttctacatccagattacaaatgttgccagggcaaaaggggtcccaactgctagattcacttctctgggtttgtttcttttactgacactcagcaggtaattgattactagtttattatatttttaatgctttaagaaagaattatttttatatatcacccggctttattgttgtctttactagggggattatctgaattacctagacatccattatctggaacagagttctgtctctcttcacttgtcttaattgaaaactagagtcagcacccctgaatatcagcggaatccactgcaccataatctgtggattatgctgttaaagcaaactaaatatggcctgagaaagattccatacttttatatttgggtccttgtggaggaattgcaacctagtttaatgggtagacaagattgaaaacctaacttaggaatatgtgcctataacaatagctgagtcttggccaatcccagtggctgtaattcaaccattcatacactgctgagtgttcaaattgtgttcaaataaggcaaaaactgagctgtaacccatccagccattctgtacctcacttccaatttccatatgtcattccttttttttttttttttaagaaggagttttgctgttttgctctgttgcccaggctggagtgcagtggctcgatctcagctcactgaaacctctgcctcccgggttcaagcaattctcctggctcagcctcctgagtagctgggattacaggagcatgccaccacagccggctaatttttttgtatttttagtagagacggggtttcaccatgttggtcaggcttgtcttgaactcctgacctcgtgagccacacacctcggcctcccaaagtgctgggactataggcgtgggccactgcgctcggccctccctttttttttttttttttttttggtctataaatcttcttccaccatgtgactgcgctgagtctctgtgaatctgttgtgattctgggggctgcccgattcgcaaaccgttcattgctcaattaaactcctttaaatttaattcagctgaattttttctttcatcaatgcccatattctgaaggtgtgagtgagcctataccaacaaggtcaggctcaaacctagccattttcttccaaagtgttaaccacagtattaaatagcaccaaggtttttaaaataactgagacatttacacacaaatatatttttaaaaaatagagatggccgggcacggtggctcaggcctgtaatcccagcacttggtaggctgaggcaggcggatcacctgaggtcgggagtttgagacaagcctgaccaacatggagaaaccccgtctctactaaaaatacaaaattagccatgcatggtggcgcatgcctgtaatcccaggtacttgggaggctgaggcaggagtattgcttgaacctgggaggcggaggttgcagtgagccgagatcgcgacattgcactccagcctgggcaacaagagtgaaactccatctcaaaaaaaaaaaaaaaaagagatataatccagtaccttatatctgtgctacaccctcatactgtagactttgtatgactgtacgatgctcttctttgcatgactatacaaggcccttcaaaacccgagaaaagtgttcctattctcatgtcaaaacttcctagcactattaatggaatgaactgttgggggaaaatgaaataaaaaagcaatgttatttcccctaaatctttagcaagcacttgttggattagtgaatctttgcccttgcgtgcaagtcagaggatggcagctcaaactcactagaatccatctggttgtctcctcttttcttttgtctcacatgctttgttatgtgtcagtttaactatacatattttaaaataaggactttcagggcaaaacatcttaccatatactatcaccgtaacttgatgtaaacttgaacttagtatacagtaaggctgagcttataaaatgttcattcaggcttacgtcaagttatggtggtagaatatggtaaatgaacttatgtgatcttataaacttaaaaactgcttataaactgctctaaaactttttttaaaaattaaaaataaaacaaattcaaggtatgctcttctactggatatgccatcttaattttctgtaacggaaactatccttttgccaacatctactcagatgactggactaatacagtcatgcctagatcaacctcagggatatgatctgaaaaattagtcattagggcatttcatcactgtgcaaacattttagagagtatttaacacaaacctagatggtatagcctactccacacctaggttatacggtgtagtccattgctgctgggctacaaaccactacagcatgttactgtattgaatactgtagggcaatggaacacacagatacgtatttgtgtacttaaacacaggaaagatacagtaaaaatatggtattatagtcttataaaaccatggtcgtacatgtagtcagtcattgacggaaaggtctttgtgtgaagcacaaatgtagttccaatttgagcatgacatcttgttgaaggtttaagaattaacctgtatactgagagtacatgtggcttcaggttgttcacatacatatattttcaggttgttcatacatattatatgctattataaggtattttaaactaccatgaacaccacaataaaacatgggaaaatgttaatgatttattagaggaaaataactcagttatgaatattgaagcccattctaaagatagaatttttgaagctaaagaatatgccctagataactactataggtattgtaaaaacaatttgttttgaaaacccagagggcatattcaaaaacaagaatctaccatacagaaaggtagtcgccatctcaaaactctcatatatagcaaaggactttggtcttcccaagatagccatttggttgtgcctaagtcattccccagaactttgatgtgcctcgcacatgaaagcacccataaataatggcaagaacaaattcactacaaattttcaaaattattgttagaaaatttttctcaagaagctctatgggtagatgaatcttttcttctctgtgttgatcataaccctccaaaaaactaaaactatagcaaggcttcagttttccacctccagtaccatttgcgcatttacaaatggatttcattcagttttccaaaattttaaaaaattgaacgttgtttcaacaatattttcaaaagtaaaattgtgtaatttgggttggactgaagctttctcttctaaaagattaatactttaagttagtgttgtcaaatagggctttttacaatgatgaaaatgttctatatctgtgctgtccacctggtaggtatgacatgccacgtgtggctattgagcattgaaatgggaatagtacaacagctgttaccaaaacctaataacaagtatcattcaaagcttgcagattttgtttttccaactgggaaatacaaaacatttagcactgttaatggacagagaaatccacttcagtagtgaaattcttaagattctcccattaaaacatacactttttgtccttattctcaaaatctgagaaagcaacacaaatttatggtcttctttaaatcaacatttgaaaacaccatcgcaaaattacaactgagacagtgagagatctaacctaaccaattccatcttgcttctaacctccaagctgtccttgttcattcctggtcgtaggctgacctaactttgggaggaacttagtttatagtttagctttgaaacaaagacaatagcagccctttccaaaacaaacccgcttcctgcctggggactagactgctttcgcaggactaacaaattagccacaagattataaattatggtttaggagtcatgcagctggaggctgcaagattctaaacctcccccaattgctcctcaggataacatcactattgtaaaaccgaagatcagttcttgagatattttgcagcccctgtactctatggatcagctagcaccacccataacgataaactggctcatctggtcttgtggcccccatccagaaattaagccaacacaagaggacagcttcgactccctctgatttcatctccgacccgactaatcaactttcccaactcactggtcccctacccaccaaattatccttaaaaactgcaatccacttggggagactgatttgaataataataaaacgggtctcccacacagccggctttgcatgcccgtcttgataaatggttctgtctaggcagtgggcaagctgaactcattgggtggttacacattttcaaattttcagagctttccttagactaaaactttaccatcagtcctaaggtagtatgatccatgctacaaaactcgccataaaaccttactatgtaacactgctatagaaatctataaagtgtttccttcgtaggagggccgtaggcagccatggcgcccagcaggaatggcatgatgttgaagccccacttccacaaggactggcagcagcgtgtggccacgtggttcaaccagaagatccgcagaatcaaggcccggcaagccaaagggcgctgcatcgccccgcgcccggagagtcgggacccatctggcccattgtgctgtgccctgctgtgcgttatcacatcaaggtgcgcgccggcagaggcttcagcctggagctcagggtggcgggcattcacaagaaggtgacccggaccactggcatctctgtggatccgaggaggcagaacaagtccaccgattccctgcaggccaatgtgcagcgtctgaatgagtattgctccaaactcatcctcttccccagaaagccctcggcccccaagaagggagacagttctgctgaagaacagaaattggccacccagctgacaggaccggtcatgcccatcaagaatgtaaggagaaagcccgagtcatcactgagaagtagaggaattgcaaagctttcgctagtctccgcatggccggtgccaatgcttggcggcaatgctcggctcttcggcatatgggcaaaaagagccaaggaagctgaaaaacaggatgtgtgaaagcaaaaataaagccctcttggggacttgtaataaatacgttttaaaagaaatctataaagtttaaactgattcttcctctgacagagaaaggcagtttcttaacagatagaaaacacgtgaaactggtggtcggtcacttcccaataagatctcaggagtggggagaaataacacaagatttaggaactatgccaacgtttacgaccccaggtctagaggtcaagccgtgcacttggtctctcaagtcgcctgcttggccctcttccaagtgtactttccttcattagtgctctaaatattttcaataatttttcacccctgctctaagacttgcctcggtctctccttcggcattatgctcctcaatcgaattctttccttctcctgaggaggcaagaattaatgttgctgcagactccttacagataactgccaccgctaatatgttgagatgttcacacatgcatgtgtgaggcccttcaaaatgtgagctgcggttagaattgggaagagaagggagtggggatatgtatctttgttttctgattgccttccatatcttttaaaactagctaagtgctgcttcaagtcagccagatacgaaggcttcaatttatttaacacaataaagaacttctatttggatccaaagcttacattatgctttaataaaagttaccctaataaagtcagaaacaataacaatgagtcaaagaaatgcatacaaagtaggccaggcgtggtggctcacgcctggaatcccggcactttaggaggcagaggcgggtggatcgtggatcacttgagttcaggagttcgagaccagcctggccaacatggtgaaacccccgtttccactaaaaaaaaaaaaattagccgggcatggtggtgcatcatgcctgtaattccagctactcgggaggctaaggcaggagaatcacttgcatctgggaggcacagcttgcacgtgaaccgagatggtgccattgcactctgcactccagcctgggagacagagtgagactcttgtctccaaaaaaaaaaaaaaaaaaagcctacaaaaagcttacaaagtctaaaatcggacgaacaagaggacacctgatgggggaaaagaaaagagattgcgatgggaagagagtggtggggaaatccgtgggacagttttcctattttctgggtctgtcccttgaccaaggaacagctcaaaaaagaaaggatctaaaataaattgtaaaaaattacctgtggtttcgcatttgttttctgtctttttctttcttgcttgatcttcgataatactgggaaatgtaaccaatgtgattgggcttgttaatttggtgccttgcttgtttttcgggttttggaattctgccagtctgtgcttccgcggcctctttcattttgtctttcatctcttgacacagccacccagggtggtgtcaaagccttagagcagaaatgcatcaatattgaaagcaaaacggagcttgttttccttggtttccatgtgaatttgaagaattgagagagaatgaaagtgccacaaaaacaaaagaaaaaaaattgaggcgagtcgtggacatgatagacatgattttgcaaacaaggcacatctaggagaaaaggcgggagaaaaatgaagctggaggtgccggggattgaacccggggcctcgtgcatgctaagcacgcgctctaccactgagctacaccccccaacgctcaacgtgggccaaaatatttctatgacctgttactattatcggtcgtgccaagaagcatattttgtcgaacttaattttgaattcgctatactggatattgtttcctgactgcgctgagagaaggaaaactgaatgttatatcgaaagtcccgtgctgggcctgggatctcccgctgcaggtcaccctctcggacggccgctcgacaaccacctatcggggtttataagggagccgtcctgcctggccgccccccagagaaaggtctgtgatggggtgattctgcttggaaaggttgccaggaaaccgcgagcataacgcagaaagataaaacgaaagccctaaacgccgccgtgggaatttaagtccaaggggcagagaaaacaggaggggaattgcagatcggcttgtcccggtcgtagttactgcccctgcaggttcccgcgcccagcctcgggatggagaacctggcacgctacgtttcgcgggctctgagactcgggtggtgagagtcgccgagatgcgcactgggaagagaaaagagccaggacgcacctgcatttatggcgccatcgcccgggcggaatcctccacggaataaaaagtatgcagaagcaaggcgatttatgactgcataaaccctccgtgctcctggagagttcttagacctctccactccttggcacaactgacctctccactcttcgacaaactggcaagcgcttgccgccgttcgccaaaccttggtacgacagtcaatccagaaatgagcttctggaacaaatcctaaatccttttttgtctgtcttcttctgattcgctctcatccttaagggacctgtttctccttcaaaacctgaaaacatctaacctatagtaccaaccccagatccaggcctggccttcctgaccagtcaaagccagttggactgtgcgcctagaagtggacagacatgcgaaatgccatactgtatacgtacaatgcataggccaaaggcgaccctatgacccagagattagaaagactcggacgtcttttgactgggttcaggtcacactactcccaaaatacgacacctcggcatttgagaaaacagcagaagcagaaacgtttttctctgggcccttgttccgtgaagcgggccatgaaagctacctgatcttccaattaaagtaggtgataagaccgtcaattcagaggggagaaaatgtacttggaggaaataaacgaagacacagagatgccaaagagaacctgaataaacaggctttgctaagttcaccccagtttataaccattagatcatacccccttttatccaattatactgctatgggactatccacttcatcaaacctaagcataaaaatataggaagtcctcacttattgtcagttggtttttggaaactattactttaagcaaaataaaactaattctaccatagactagactaattgatttaagagttaattttcttggcaaatgtctgatcacaaaaacaccaaatttctaaataaggactccaaacacttctaacactaaatattgaaaaaaatatgagctgcacctcaagttaagatcagcaaaaacgacatgattgatttatttttggtgaatcagtgactgcaattctagtggtggcaggttatatcaaggaataaatgtttgtgaaatagcagttgtaaggagcaactcctactaacacacaattcgtaaaacattgtgtccggaattggcgggttcttgatctcactgatttcaagaaagccacaagtcctccggatgagtgttacaatcgttagatgcggtgtagccagagttcattccctctgacgttcggatgtgttatagagtttcttccttctggtggtttggtcttctactggctcaggagtgaaactgcaaaccttggcagtcagtgttacatcttctaaggcggcgcctccggagttgtttgttcttgcccgagaattcatgtttttcctaacttcaaaagataagctgcagaccatcaacaaattacagctcataaacgtagtgtaaacccaaagaacaatcaagatccatcgcagagagcgaaaaatcacttccgcaccgtgggaaaaagcccgaacacgttgtcgcagttggttccggcagcctgcttttattatcttgtctggccccacccacatcctgctgattggtccattttacagagaactgactggtctgttttacagagagctgattggtccatcttcacagagtgctcattggcgcgtttacaatccctgagctagacacaaaagttctccaagtccccaccagagtagctagatacagagtgtccattagtgaattcacaaaccctgagctagacacagggtgctgattggtgtgtttacaaaccttgagctagatacagagtgccgattggtgtatttacaatcccttcgctagacataaaggttctccaagtccccaccagagtagctaaatacagagtgtccattggtgcattcacaaaccctgagctagacacagggtgccgattggtgtgtttacaaaccttgagctagatacagagtgccgattggtgtatttataatcccttaggtagacgtaaacgttctccaagtccctaccagactcaggagcccagctggcttcacccagtggattttccaccggtgccgcaggtggagctgcctgccagtcccgtgctttgcgcccgcacttctcagccgttgggtggccgatgggattgggcgccgtggagcagggggcggcgctcgtcggggaggctcgggccgcgcaggagcccatggcggggaggggcgtctcaggcatggcgggctgtaggtcccgagccttaccccgcggggagacagctaaggcccggcgagaagtcgagaacagcagctgctggcacaggtgctaagcctcttactgctcggggcttgcggattagggggccgctccgagtgcggagcccgccgagcccacgcccacccggaactcgcgctgggcccgcaagcgccgcgcgcagcctcggttcccgcctgcgcttctccctccacacatccctgcaagctgagggagccggctccggccttggccagcccagcaaggggctcccacagtgcagcggcgggctgaagttctcctcaagcgcggccagagtgggcgccaaggccgaggaggcgcctagagcaagcgaaggctgtgagggctgccagcaagctgtcacctctcagtatggcggctggctgttttagcaccatgtcgtttattgtcatgcatttgtaggattatgaaatgcttcctgaattttgcttttacagtaacttgtattcattcatgcatttttcaacctgctcactccagttcaaggtctttggtggctgaagcctaattcaactcctcatagtgtcaggagggaacccaccgtggacaggtggccattccatcacagggcgggctcatacacacacacacacactcacacatatgctcgcgtgctctttcactcagactgatgacgctagactcagactagatatgctaatgaacctaatgtgcacatttttgggatgtgggaggaaactcagacagtggcttccaggagaaatagacttttttctcatcaacattataacaaaatgatgttgaatgaaacaacgttattcaagggtctgctgtacgcagattttcctatttctttaggtcttcatttttgaaggctcttgtgtcaataaaatttgtttgatttgtatgcttttcctttttttttttttttttttttgttgttgagacagaatttcacttttgttgcccaggctagagtgtaatggcgcgatcttggctcaccacaacctccgcctcccgggttcaagcgattcttctgcttcagcctcccgagtagctgggattacaggcgtgtgccactatgcccagctaatttcgtatttttagtggaaatgggggtttctccatgttggccaggctggtctcaaactcctgacctcaggtgatccaccagcttcagccccccaaagtgctgggattacaggcatgagccaccccacccggcctgcttttcccttgttaatctatcttttattatgaagtgtcagccatgaacctggcactgggtgggaaaagatgtttttctgccctagaccttcctataagtgcttttgggacaacactgcaggagtccccaaaggtgaaaatttacctgcgggagttaataaaaacaggaatccccaggccttaccccagagactgagatgctgagtgctttcagagtctccagaaaagggcccaggaattattatggggtgacagatgtcacagctagatcgtcctcacatctatggaatattgtgttatttaatatttcccagttgaatttgatattcaggcaagtttgaaaaccactgggcctgaaaatctagccacaacagaaactgaaactaggatctggggaaagttaacaaggggaggagaaagattggaaagtattacaagaaaaacttgggattgtaacgttccccccaaactgggaaggtcccggaagaccaaagacagtccagcttaataagcaggtgagtttagtaggacttagatacagggtactcctgggtgcagcaggatagctctagagatccatgccgcctcctgtctttaaactgtttctaagttaattttctggctttttgcctactgtgtttgagcaatgagactgtttttcttggtaggttctcagatactctctgggatgtttgtgttctcaaggacacctgctcctctgctgggcatcgtggccttggctcaccactgggccttcagggttcaggcagtagacatacactcttaagtgacatggtgggtgatctgtcatgctgcaatccaccctgcctcccatttcttacattctttctgccaatcttgtgtgagactccttgagtagggtggaaggaaagaactatacaggtctataacgtctagccatggcttgcgcatacaggtcacatctacagtatacgtaggagcacaaaaagcagaagttaactacaattataatgtctattagcaaaacctaattcccatgactagagaagctgtgtaaccaatttgagaatgagtaaaagaaacctaattaggttatatcatggatctgagttgacaaatggtttaaagtacctctgacattactctcttcatcagggaaataggtgcaacagttagcacctagaaaggcacattttgggtctttgtcacgttggtgattgagcctctaggtggaggcaatccttagtgagcccgggttgcattatcagtgctattgtacaagtcactccagttctgtcaggagaaaggcagagtattttaaggcatatcattattattttatagggagaggtatctgactggttgttgactgcttctggagttgcagctcagtctagaaagacattaccagctgccatgagtagcaggaacaacctatgggtataaacacaggtggttagtaggaactctcacaggcgtattcactccttgcaacatttttttttttaatttttttgagacagagtcttgctctgttgcccaggctggagtgcagtggcacgatctcggctcactgcaagttccgcctcctgggttcacgccattctcctgcctcagcttcctgagtagctgggactacaggcgcccgccacaacatctggctaattttttgtatttttagtggagacggggtttcaccgtgttagccaggatggtctcgatctcctggcctcatactccacccgccttggcctcccaaagtgttgggattacaggcgtgagccaccgcgcctggccacaccttgcaacattattatcattgtgttttctcccactggcactattagggatgccactgtgggcttcaggcctggattacaaaaccacccatgtcttcttttcctagaagcagccacaatagccaattgataagtttccagccttgcccatgctatccatactataattattccagcaggtatgggtgctgccatctgttgataaagtaagtctctcggaactctatcaaggagcacagctgggaccactgcccctatggcagttatcatggcaccaccctccagtactataaaactaatccagtatggaggcatattccagctcagcttcaggtccctgtagccatcactgcttggcagatccactggtgttctcaggagcatgtctcaccatctgcctcaggagcatggctcagtgtctttgaggtaaccccgagagtttgtgggacatgtcttacaggccttgccaaccatttataaggagtgatgccatgtgtgctagtgggtgactcatttaaagtttgtatggctttatggagattcttagtccaggaacttaaagagccaacctgaaacagtgcacacatctgggtctttaacaggccattatttctttctgtaagtcctgcctctgttggattgtggtggtaagtggaacctccagtctatattttcttcttttttattttgagacagagtctcgctctgttgcccaggctggaatgcaatggtgcgatctcggctcactgcaacctccgcctcccggattaaagcaattctcccacctcagtctcccaagtagctgggactacacgcatgcgccaccacgcctggctaatttttgtatttttagtagagatggggtttcaccatgttggccagactgctctcaaactcctgacctcaagtgatctgcctgtctcagcctcccaaagtgctgggattacaggcatgacccaccgcacctggtccagtctatattttcttctgatgcccagtgttggatatctttgctatgcccatcaatgtaccagggcctagcagatattggcggggtacccttatatatggtggttggcctgatgggtggctccactgccatgttggctccctcccataactgagaccaaaaccctataggtaccattcccattagttgcttttgccccaaacctaaattcatccctgtgacatctctggtgattactaatacagcagtagagtctgtatgcttgggcttgtttcaccaatatttttgttttgtcaaatgcctcttgttctatttatgtcatctcattttttacctgtctttattagggtgtataatgggtggagtatttgtgccagatgaggaatgaatatcctccagtagcccagtaaacctaggaaaacctggagttgctctactgtctggagagtagactactatgctatcttatcaatgacggctttgggtatgtttcacatcttacccaaccaggtaactctcaggaatttgacaggcatgccaagcctctgtatatttttggggttgattttctatccctccttcaggctgtccaaaacagtttgtaggatagtctccaaatctgtaagagactctagggtagcatgttatcattaatatagtgaaacagggagaccaaggcaggcaaagagattatagacagctcctgtgtaaccatactgtgagagatggcggggctttgcagatgcccctgtggtgacacctggaaagtccattcttggtcctcctaagtgtagaccaactggtcttgtgaatcttcagctgaaagaatactggaaaaggtattaatgcagtcagtcacagaatggatacttcccagcttcggtactgcttgctctagcagttgagcaatattggatacagctgcatgtacagggcgtaccactttgttcagctagcggtaatccaccatcatcttccaggcatcacctggcttcttcacaggccaaacaaggctgctgtaggggctctgggccagtctgactatttgtaccttatgtactttctggattgtttgggtgatttcagagtgcccccccaatagcaggaagtattgtttcatgttcattacctgcaaggatacaggtgcatatttggcctatcccctttttgctttctctgtggacctgatcgttatttttatccagctcactgaggtctgccaatgcttccccccatcacagatttcatttcccactaagaggctcagaagtgttgtctgaaattggtgggttctatggtctcactgacttcaacaatgaaaccgcaaaccctcacagagagtgtcacagctctaaagttcgcgggcgtggagtctgtcccttctgatgttcagatgtgtccgcagtttcttttttctggtggggtcgtggtcttgctagctcaggagtgaagctgcaaacctttgcagtgagtgttatacctcataaaaacagcgtggacccaaagaatgaccagttggaaaatttattgcgcatagtgaaaaaaacaacgctttcacagtgcagaagagacaacccagcgggttgctaatgctggttcgggcagcctgcttttattcttttatctggccccacccacatcctgctgattggtagagccgagtggcctgttttgtcagggcgctgactggtgcgtttacaatccctgggctagatacaaaggttctcctcgtccccattagattagttagatacagagtttccacatacaggttctccaaggccccaccagagcagctagatacagagtgtcgattggtgcactcacaaaccttgagctaaacacagggtgctgattggtgtgtttacaatccctgagctagataaaaagactctccacgtccccaccagactcaggagcccagctggcttcacctagtggattccgcactggggctgcaggtggagctgcctgccagtcctgcgccctgcactcgcattcctcagcccttaggtggtcgatgggactgggtgccgtggagcagggggtggcgctcgtccgggaggctcgggccgcacaggagcccacggaggggggtgggaggctcaggcatggcgggctgcaggtcccgagccctgccccgtgggaaggcagccaaggcccggcgagaaatcgagcacagcgccggtgggccggcactgctgggggacccagtacacccttcgcagccactggcccgggtgctaagtcccccattgcccggggccagcagggctggctggctgctccgagtgcggggcccaccaagcccacgcccacccggaactccagctggcccgcaagtgcggcacacagccctggttcccgctcgtgtctctccctccacacctccctgcaagctgaaggagtgggctccggccttggccagcccagaaaggggctcccacagtgcagtgggggactgaagggctcctcaaatgccaccaaagtgggagcccaggcagcggaggtgctgagagcaagcgagggctctgaggactgccagcacgctgtcacctcagtgtgaccaatgccctatattataaatgccattttttgaattggaaatgatccagacattcaacaagtacttaaaacaattttaaggttttaaactacacaaaaagttcacccgtaagcatttatctcttacatttactcaatttattcatttttagcagtttacctagattactcattggaacgaagacattagacaaagttactcatcattctgaattattttttctgttaaactgtgaatgtcaggtgttcacctaggcaagaactttaaagttaaacacatgggcatttttgccaataactcaggaattttagctgttttcactgacctaacaatattaaattagtcatacttaccaaaaaatcacacaaataaagatcattctgtttttggctgggtttacagacttatgatctttaggtcaaaccctgacaccttaaaatatctagcagaggcaaatgtaaaactaattggtaaactgagacaaaaacgtatgctgacaattcaaggacatttctatttttattttaccaataattttaaagccagattatttattaaagattactaaattcatatgaacttgaaaagcatttggactttatgagtactcatttatgtataagccatttggtagtatgctaggcataacacataatatatatacatacacataaacacatttaagcatgtatctatacacacaaaccaatatccaacagcttttacttggaactctagccatgagacaacatcataaatttactattttacaaaagatagttggatcaggccgggtgcagtggctcaaacctgtaatcccagcactttgggaggccgaggcaggaggatcacctgagttcaggagttggagaccaggctggctaacatggtgaaaccccgtttctactaaaaatacaaaaaagtagctgggagtggtggcgcacccctgtaatcccagcttctcaagaggctcaggcaggagaatcacttgaacttgggagatggaggttgcactgagccgagatctcaccgttgcactccagcttgggcaacaagagtgaaactccatctcaaaaaaaaaaaaaaggaaaaaaaaaaaagaaaagctagatccaaattatttttcacaaaattgagacctgtccacaagactagactttgtttgcactgataggtaatccaataaagactgtggaacacaattttgggtaaagcagtttctataccagtttgatttttaaaatcctcatttatccacatccccttttttctgtgcttcaaatgagtttcattgtttacattttagtaagaactggctgtactgtagagaaaagtaaaatctccgagtggctttgaattagtgagttttatttcaacaccaatagcttaataatggcatatttgagtgttggggtgatcagacccaacaccaggtcgtgggggcgacaaagtcctgcagagtcacagaaatgagaaaaagacagtttgagagagaaagtgggactaagtggccatcacgagtgtggaggctgcgaaggccctgagctctgggagcccacgctatttattggtgctcaaacaaacaggtagtgaagatgtgggggttgaaaggaaatggtgtatcaagtgaaagagaaacatatggctactttagataatgggagtgctaaaagcaaggagccagcaagtctagcagacatacaagtcctgttgtctcccaacactcagcttctctcccaacattcgaggctgggcgcagtggctcacacctgtaatctcagcactttgggaggccgaggtgggtggatcacaaggtcaggagttcgagaccagcctggccaatatggtgaaaccccatctctactaaaaatacctgggcgtggtggtgggttcctgtaatcccagctactcgggaggctgaggcaggaaaagagcttgaacccgggaggcggaggctgtagtgagctgcactccagcctgggtgacagagtgagaatctgtctctaaataaataaatagcatattcaaaataagcagaaacaaaaataaagagagaaatagctttaggagactctacttaactctatagttgcagcttaaccatttaaaatccgcattttttttgttgtaatttccccatcagttaaaaaatgtgcacaagaaagggccatacataataggtaaccagctggagtcctaaaaaagctggcatgctttgaacttctgcaggtgtttctatcctttctctgtttcctgctctaatgatttctcaggggccagccttattgcaacaatagcacatttgctatccttatcctactttgatatcttagcctcttgcaatatgcgcttagtccccgccacattttctgaatatccctatacttcctcagcagtccacaaaggttgagcgatggagcaattccaccccacctgcatgttgccgaccaccccaggattccccctgcagatgccctttcctgactcattgtttggtctctcagatcctgtttgtgatgccaattgttatgagcaaaacttgggactgtaacgtccccctaaattgggaagcagccaacagaccaaagaatgacttggacacgtacagcttgacaagtaagatgaatttattaggacttacacacagggtactcctggatgtagcaggacagctccagagatccatgcagcctcctgtctctaaatggcttttttttttttttttttttaccaagtctcgctctgtctcctaggctcgagtatagtgctgccatctcggctcactgcagcctccgcctcctgggttcaagtgattctcctgcctcagcctcccgggtagctgggattacaggcacccgccaccccatcctgctaatatttgtatttttagaagagactgggtttcactatgttggccaggctggtctcgaactcctgggctcaagcaatccacccacctcggcctcccagagtgtgggattacaggcatgtgccaccgcacccagcctctaaactgcttttaagcttattttctggctatttgtctactgtgtttgagtgatgagactgtttttcttagtaggttcctagatactctcccggatgtttgggttcttagggacacctactctttggctgggcaccatggccttggctcaccacctggctttcaggattcaggcagtggacatacatccttacctaatctggtgggggattcatcacactacggaagggaaaagaggaaacccatgaggtgagaggcagcgtgctgggtagtggagcctcaaggatgctcaggatttggatgctcagatctggatgtgtcccaggtccccaatgcatctgtgcttcctccaggtactagagaagaatgaatgccccttactctaaagtgaggcaacagaaggtgtcaatccttcgagttcagttgttcacaaagcataggtccatcagaatcatctggatgacttgttgaaacatattggaacatcctttgggaatttctgatttagtggacctggggtagggcccaagaatttgcagttctaacaggtttccagattatactgatggtgatccatggaccaaattccagaacctcttacaagagacccagcttgtcttgtctgagacttttgtgactcactgagtctctgaatgggctcagcattttctcaggtgcatctcttaaactgtatgtttgaagttcgttagtcacatacagctgctctttgaaactgtcataaggaagccaacccatctggttgtcagagagcagtgttaaatgctcacacaagaggcaaggctgcatagggttgggcagctccagttgcagaaggaaacaccaatttagcatgtttgctttcttgctttttttgcctgcttatttttagcatatctagttgagaatccaaaacaacaacaaaaaaagacaagacagaccacagacaaatgtgtacactttacaagattctcaagacaacaacagcaacaaagtttctgagtttatgaatctaagtagcattttactcccaggatctgaagttcaagttctgatccctgtgcacccaaattacgtctttctcctccaggtagaaagctatcaaaatccagctttttcctgggcacgctctttatagcatatgcagctgactcttctgctactggcacactgctattggataaaaagaagtcttggctgggcacagtggctcacacctgtaatcccagcattttgggagaccaaggcaggtggatctcctgaggtcaggagttggagaccagcctggccaacatggtgaaaccctgtctctactaaaaatacaaaaattagcctcgtgtggtgtggcaggcgcctgtaatcccagctgctagggaggctgaggcaggagaatcgcttgaacctgggagatggaggttgctgtgagccgagattgcaccattgcactccagcctcagcgataagagctagactccaaagagcgaaactccgtctttaaaaaaaaaaaaaaaaaaaaaaaaagtctcaagcgcagaaccgtgaaaaagctaaagttgttatacaattggagagcgaatgattcaacattttgttaatcattgaccttattctctgtcctactctaaggagggcataatgtgtgtctcctgcaatcggtcataggaataatgcttaaggtctaaactagcagagacttgagtgacaaaaaacaaagaaggaacctatttgaactggagaaagaaggtggatgctgcaggattgagagactttatggattttaaaagaaacaaagatggagagtgtcctcaggaaacacacacacacacacacacaggtagtgtaagagatggatgttgcctttcaccaaactattaagtagagaaggagaagcaggaattatgcttgtttgtttgtttttatttgtgggaagtaggatggtatccagaaggggatgaagctgtttggttttggacaagaatttaaaatacttaaaggcaacttcatggaaatgtctgataaacatgatctgtggatcggccattgcactccagccttggtgacagagcgagactccgtctcaaaaaaacaaacaaaaaaataagttggtaaggatatatttttttgtccatgttctgtttcaacttatgtagattattataaattgatgtaacccacgtgagaggaaaatgtgaatataaaaatgcaaagccctaacatttactcacacacatacacacacatacacaaatcttctgaaatttcattattttccccttttctcccattaaagacagacctattattatccagggacagtgaaaatgagaaaaggagaataaaagggaacaaaatggaagagaggaagctaagcacatatttctgggtatattttgcagaagacacaggatgcaaagtacaagtggaagagaaagtggggatggagccaaagttgagacaaaaaagggggcagaaataaaagaaggaaaatggagccagtcagaaattgcccttctctgagcaaaagaaactgtagagaatagttctgaatgataaccaggtaaaggagatcagaaatagagtgggaagcaggttaggaggcttaacattttcaggttagcaaggtgagatttaaaaggagaggaaaaaacatctccatgaactctcagtacttatttttattttagaattagaaccctgtgagaaagctgacaattgtattttagctcacaaagatctcaaaccctaatattgtcactatccaggatctaaaccttttagctctgttgtggcctctctggaggaaggattaggaccatgaatcatggtatcatccacatctgtccttgggcagttctagaagatgtcctaagccccaggtgacctgattccaattcattaaaaaggtgagccacatatattctttcaacagtaagtgtcccaatgctgatgatgaagatgagaaaatatcttccagtagcttaactttttttcagtttcaatactttcaatatatccagtttcaatagttgcatataacttcaaatatttggctttaattgaaaatgttcaccaaactttgaaaatggggagagagagttgcacatattatacacaatatgtatgtgtattgcatcaaacacttataatgtgtcttgtacaggttccagtttccagttatttaaagggattaagaacttcaagactgaatctgagtggagactctgacatataaatacagacttatccaattgggatcatactgcatatgtttttattatttgctttattctcaacattgtattcagaacatcttcccatgttatcaaaaattattttagaacagagaatcctcttcagtttttacatttgtccttgtacttgttcatcatggcgatattatgttttgttaatggttgctgcatagatagggcgcagtggctggctcttgtaatcccagcactttggaagagacgggtgggtctcttgagtccaggagttccagagcagcttgggcagcatggcgagaccccagctatacaaatacaaaaaaattagctgggcgtggtggcgcgcgcctgtagtcccagctactcaggaggctgaggtgggaggatccctttagcccaggaggtcgaggctgcagtgagccgttatagcgtcactgcactccagcctgggtgacagagtgagaccctgtctcaaaaataataataggctgggcgcagtggctcacgcggtaatcccagcactttgggaagccgaggagggcggatcacttgcagtcaggagttccagaccagccatggcccaacatggtgaaatcccgtctttactaaaaatgcaaaaattagccgggtgtggtggcgcatgcctgtagtctcagccattcgtgaggttgaggcaagagaattgcttcctggaggcggaggttgcagtgagcccagatcgtgccactgtgcactccagcttgggtgacagagcaagactctgtctcaaaaacaaaacaacaacaacaacaaaataataataataattgctgtatctttaggcaatctttgcagtttttgcagtagatgttaagctacctttctaaaatgcagtgggacattttgttgtttttgtgttctgcaacagtttatgtaaacctgtattggaatgacaagaagtacgatattattccaaatcttgtactcatgctagttcatatcctatgccactctgtggtctcttcctcatcaatgtcccttcctcatcgatgtccctgggttcctgagcaaagcctaaagtaagacactctaaaaattttgactgaatattcggcaataatttgagcttggtcttaaccccaaagaaaatactatagaagaaaacactaggaaaaatagaagttgatgggattctttgttgacgagtgtagtgttcaggaagggagagattttgctcggatttcattgtgttagaataacatgtcattttcaaggaaccaaaatcatactgtgtaatggacagaccggtgttatagttctacttaagggttggacgtttcacatctttcctatcccatccacacttttggtgactgtggggttccccccaaacaccctattgttctgtgcattaatccacagcgagctggtgacgcgtttttgtcaagaccaaatcaaacttgggaagtcttcaagtcaggaatggaagtcactaagctccatgtaaataaacagtatatgtgaactgaataacctactttgttccggccttacgccaaccctgcacttccaacagaaccatctttgaagtttcctggccatcactgccccgcttccagtgtcgccatcattcctttcacacaccccacttgccgaaagtacgttctgtgcgctctctcaccctcctcttgattgttttccctaaggggtgcagcatcagttcagaactgaaaatctccctatcccacttctcgaagccattaatcagagatttcaacagggttcaccgctgatgacccatctaactgctcgtcctctcacagtttctgacaactgtgtattagtatttgcaagttttggaaggtgttgtaaatagtttttaactgttagtgaattttaatttcaaacgaggaactttttattaagctggatctttgaagtcagcacttaaaaagcccccttccccaccatgttacattccctttgtgtgctatataagcatctgtctttggcggttggccgcgtggcctaatggataaggcgtctgattccggatcagaagattgagggttcgagtcccttcgtggtcgtcgttttgcgttctctggttcgaaagatatttgttgattcagagcattttcccttttcttgctccggtctggctgccaattaacaactaaaggtagaagtcttatttaacgagtatatacggtgtgcctgccctgtgacaactgctttataaaagaacaaagcagaaatagcacttggcctcaaagagcttactttctactggatctaacagttgaaatcaagcaaacgctgggaagaaaaaaaaattgtttccactcctgtgaaaaaaagaagtacgaggataaaataaaaaaataagggatggggacttctttaggaagcatccaccctcctggaggtcctgaagaaatgctatttagctgaaaaatgagtatttttcaggcagaaggaatagcatttgttaattcactgagaatctgaaatcactaagtattttcaaagttcaggttgctgaactcttgtgtgtatgtgtttggagctgggggtgggtgggggcgggggaaggagtggaaatcactacagagaaaaatcaacaaaaagggataaagggagttaaatttctgggaacaagatctctcacagagattctctatggctgagactctgaacatggtttaaaattagtgttctccagattttcactaactaccaaaaaaggtaactgtcatcacctggcaaatcgtcatcacttaagcctaaaggcagaaaccaccaaaagctttaatccaaactgagctgtcctctagtgcaacctgtattagagtagtcatgataggttgaatttttgcaagtgggccaatgccataaattgatctgaacattactgcaaagaaagcacagtgagagcaggatcaagcaagttttcatcatttttaattgagctccagtcgcttcttgaggaaaagaaagctaaaattgattctcaagaacatttgtttctgtgagaatatgtggtaactgaataagaattctttaaaaagaaacaacgcaattcccagatttaacaccaacgccagttaacatttaccgaatgcatacactgtagctgcactattccaactatgagaaatatattaatagtcttcttttacagatgtagaaactgacacctaaaagggtataacacattgcccaacacaactaataaagggtaaagctggaaacttaaccaaaatattaagttatttctggagcacaagtctcaatgtttagaacaaatttttattgtttaatggcacgatgcagtgtggtaaaatatatataacataaaatgtcactttaactttttttttttttttgagacagagttttgctttgtcgccaggctggagtgcagtggcgcgatctgggctatctcggctcattgcaacctctgcctcccgggttcaagcgattctcctgcctcagtctcccgagtagctgcgagtacaggcgcatgccaccacgcccagctaattttttctacttttagtagagacggggtttcactgtgttagccaggatggtctccatctcctgacctcgtgatccacccgcctcggcctcccaaagtgctgggattacaggcgtgagccaccgcacccagcccttgttttggcattttaaagagacagggtctcattctcactgcagtcttgaactcctgggctcaaagaatcctcctgcctcagcctcccgtgtaacttaaactacagtcatgtgtcacaacacctggctaatttttaattttttgtagagatgtggggggcagcatggactcaccatgttactcaagctggttttgaactcctggtctcaagcaatcctcccgccttgacttcccaaagtccttggattacaggcatgagcctcagcccctcaccttttgtctttttgaaatcgcctattctagatatttcatataagtggagttatacagtacttgtgtcctttcatacctagcctatttcatcactaagcaaaatgttttcaagtttcatccatctcacagcatataccagcatatatcccatattgtatgtatattcattttttaaaatttcttatattttgatgcctattctgcttacgcagttttatttttgttattttgcttatctgctcatctgttgatggctggattctccttttagctattatgaatgatgctgcaaagaacattggattacaaggatctgtttgagtctctgctttcaattcttttgggtatacacctagaattgctaagtcatatgctacacccatgtttagctttttaagggaaccaccaaaccggtttccacagtggctttatcattttacattctcaccaacaatgcatgaaagttccagtttatccacatcttcaccaacactttttcattggccattttcctgattatagccatccaagaaagtttgaaatggtaccctactttggttttgatttgcatttcccctagtgaataaagacagagtactttccaagtgcttattgcctatttacatattttgtttggagaggtgtctatttgagttctttgtgcatttaaactgagttgccttgttgattttcagttctaaggtttggtttttgtttttttggatatatctggatgttagacccttatcaaacatgtaatttccaagacattttcaccaattctatgtgctcttttaacactgcctaatgtcctttgatgcacaaaagtttcttttgattaaattccatttatcatctatttgttgtctttcagatggagctgtcacccaggctggaatgcagtggcatgatctaagctcactgcagcctctacctccaggttcaaataatttttctgcctcagcctggtgtccagaattggtgggttcttggtttcactgacttcaaacatgaagctgcagaccctcgtgatgttattttttaaagacagtgtggctggagtttgttctttctgatgttcacccatgttctgagtttcttcccgctggtgggttcctggtctggctggcttacaaggagcgaaacatgcagaccttcagcataagtgttgcaactcttaagatggtatgtctgaagttgttcatttctcctgatgcgctcatggttcttgccggtctcaggagtgaaaccgcaaatcttcacagtaagtgttacagctcacacaggaaatacaaacctcaaaaagcaagcagcagtaaaatttattacaaagaacataaagaacaaggtttccacaacagagagatcgactccgagtaggttatcgtggctgctccgcgcagcctgcttttattgccttatctggccccacccacattctgctgattggtccattttacagagagctgattggtctgttttacaaagaactgattagtctgttttgacagggtgctgattggtgtgtttacagtccctgagctagacacagagtgctgattggtgcatttacaatcctttagctagacataaaggtccccactagagttgctagattcagagtgctgattggtgtatccacaaacccagagctagacacagagtgctgactggcacatatacaatcctctagctagccataaaagttgtccaagtccgcacccgcctcaagagcccagctggctttgcctagtggatcccgcactggggccacgggcggagctgcccgccagtcccgtgccacgcacctgcactcctcagcccttgggcggtcgatgggaccgggcgccgcggagcagggggcggcgcccatcagggagacttggaccgcaagggagcccacgggtgggagggtcgggggcgggctggggcatggcgaactgcaggtcccgtgccctgccccatgaggaggcggctgaggcccggcgagaattcgaccgcagcgcgggcggacgggcagtgctgggggacctggcgccccctccgcagctgctggcccagatgataagctcctcactacccgcgctcaagacaccaatccgcactagctcatggtttgtggatgcaccaatcagcactctatctagctaacctggtggggacttggagaatctttaggtaaggagtgtgaatacaccaatcggcactctgtatctagctaacctggtggggacttggagaatctttatgtcttgtagctaagggtttgtgaatgcacctaatcagcactctgtatctagctcaaggtttgtaaacacaccaatcagcaccttgtgtctagttcagggtttatgaatgcaccagtcagcactctgtaactagttaacctggtggggacttggagaatgtttatgtctagctaagggattgtaaatacaccagtcagtaccctgtatttagctcaaggtttgtaaatacactttgcgtctagctcagggtttgtaaatacaccaatcacactctgtatctagctaatctagtggggacttggagaacttctgcgtctcgctcagggattgtaaacgcaccaatcagtaccctgccaaaacggaccaatcagctctctgtaaaatggaccaatcagcaggatgtgggtggggccagataagagtataaaagcaggctgcctgaacggtggtggctgtttggttaatgctttctccacattgtggaaggtttgttttttttgctgtttgcaatgattcctgctgctgctcggtttttgcatgcgcattgcctttgtgggctgtgataattgctgtgaaagtctgcagtttcattcctgaagccaaggagaccataaactcactgagaggaaccaatgactccagacacaccgtcttaagagctgtaacagttactgccaagattggtagctttcccgagtcagcgaaaccacgaacccacctgaatggaatgaaactctgaacatatgcaaacatcagaatgaacaaattccccacacactgctcttcagaactgccacactcacggccagggtccatggcttcattcttgaagtcagtgagatcaagaacccaccaattccttggcacattaggatcacaggtgttgagccacggttcctggatgcgtggagatttctaatagttgtacctgttgtatttatgctacatactacaacatatatgtatactataatgtttataatgcctgaaccccacccataaaaatgaacatgccataacctggtcattgtgagaaccataagtgtacccaaatacatcgtagtaggtagcaatgccctggctaaagactactgcgtgttagtacaggtaaagaattagcacagataaattttattcagtgcccaaataaagtattttaaggctcaagtggggccaggcacggtagctaacacctgtaatcccagcactttaggaggccgaggcgggtggatcacggggccaggagatcatgactatcctggctaacacggtgaaaccccatctctactaaaaataaaaaaattaactgggtgtagtggtgggcgcctgtagtcccagtcccagctgcttgggagactgaggcagggaggggaaggttgcaatgagctgaaatctcgccattgcactccagcctgggcaacagtgagactccatctcaaaaaaaaaaaaaaaaaaaaactcaagtgttgtactccatagtttccctttaatgaaaagctgattgcttttttgaagagaacttcgtattttttatctcagagtttccttttaaaagaagcaggccaggcgcggtggctcacgcctgtaatcccagcacttagaggctgaggcaggtggatcacgaggtcaggagttcaagaccagcctggccaagatggtgaaaccccgtctctactaaaaatacaaaaaattagcctggcatggtggcacgcgcctgtaatcccagctactccagaggcggagaattgcttaaacctggaggggcggagcttgcagtgagccgagatcgcaccactgcactccagcctgggtgacagagcgaaactccgtcgcaaaataaataaataaataaaaaagaagcatatgttagtttgtttccacagtaagtgaagacaggccatgtcacaaaaagacggggaacaacactggactgtagctcgtagacaaaggaaaccttgagaagtttaacactgtatcatagttttagacagaacacaataattacattgttagaacaaagtacttaaagaactgatgttactttttttttctttatttaagagcataacttaacaatagtcccacttggtcaggcctatgatccccccagtctattactgtatgattctgaagctgtgggaggaagcaatgccctcctacatatcaactcatgaattacatatacatcttcaaaagatcagagatttccattttagccatctcgtcaatatttctacataagtttaaaatacttttgttttcactttatgccacttcttaaaactgaatttcagcaagtacactatataagtccaggatttaattctatttattttaatttaactcatttcaataaacatttatggaatgcaaatgccaatcactatgccagctacatgcatacaaagatgaggaagaaccatctggttccctttctctcaatttgtaccaacatcactagatctgtgtgacagtctgggaataggactacacatagtggtccaggttttgaacagagacaagaaaacaatttatttcttttttaatttttattttagttttagttttagttttttgaggaggggtctcactctgttgcccaggctggagtgcagtggcatgaacacagctcactgcaacctattcctcctgggctcaagtgattctcccacctcagcctcccaagtagccaggattacaggcctgcaccaccacgcctagctaatttattttttgtagagacaagggtctcactatgttgcccaggctggtctcgaactcttcgactcaagtgatcctcctgcctcagcctctcaaaatgctgtgattacaggtgtgaaccactgcacccagccgacaattgatgtcttaatacctttcaactgatacccagtattttataagctttattggatatagtgagcatcttttcctgaaagagagagcagggaatcacaaatattacaaagctctgttttcacaaaggaagtctcaggagtgagtgaccatttcgcctaccctctgaatatcaaagttttcaaacatctacaggctcacacaaaatactcttcatttcccatctaagagtcgggaacttagaactggtcactgggtgagactgaccctttccttaaggaggataatgactgaaaacacatttatttctgctaaaacaagttctagccaacccatttcctgggcatgctcttgacaaatttactaaagttaagtgaggcaagaagctgccattcaaacatttcaaaattgttatattcaaaatatttcccttctatatctactctctaaaggtcaattactagagaaacacaaagttttacacacattcatcagaggtatatatcttttttctctgatatgggttttctttttaatgtctaaaaaggttctgatgggaaataagaccttcattttgagtaaagcattttccatattcagggcaatgaggaagtctttcccctgtatgaatgttgggatagttaatgaagtgtgagctctcaatgcagacttccccaaatactttacttttataagacttctctcttgtgtgcagtctctcatacgatgtcaggcctccattgtgactaaagctttctccacattccttaaagtgataaggtttctctcagtgtgtactctatgatgcttaagaaagagtgggctctgattaaaagctttcccatgcataagatatttgtagggtttctctccagtatgtattctctgatgtttgagatggtcagaattctgaaggtcttattgcatacattacgcttgtggatttccctccagtatgaagcctctgatgtttactaagatctgagctccaaatgaaagtcttgccacactgatcacattcatagtgtctgtgaaaatacagcttctataatgcaggctttcacagtgaaggcccttctatgctcatcacacttataagggttctccccagtgtggatcttctggagatagaggctagtgttcccactgaaggcttgccacaaactttgtatttacagggtctctcttcagtgtggatcctttgctgttgaataagatttgatttcttagtgaagaactgtctacattcatcacttttacaacccctctttcccataagtattttgttcagtacagttttcatgacttctctatgatctctttttcctggggtgaaaatgttctctgtctcaccaacaaaggattttcttagtgcctctcatacctgccctcagggtcacaaatgttttcaattgcaggatttaagggatcatcacttttccatcttcccaggaacagtgagtgagatgctacttcttcagtactttttggaaccctgaagtcatgcttagctttctaaacctatactcagtccaggcatggtggctcatacctgtaatcccagcattttgggaggctgaggtaggaggatcacttgaacccaggagtttgagaccaagctaggcaacatcatgagaccccatctctaaaaaaaaaaaaaaaaaaaaaaaaaaaagctgctcatggtggtgtgtacctgtagtcccagctactcaggaggctgagatgggaggattgcttgaaccaagaggtcaaggctgcagtgattgtgctattgcactccagcctgtgcaacagagcaagactctgtctcaaaaataataaataaacctacactcaccttctgaaataaaacaacaaaaaattatttaaatttcactgctaaataagagcagtaagttctatttccctttccttcaacagatttgcaaatttagctgtaaatgaaggatttgaacacaaacaaattcacactaaactctagtttcagtgtttcctatcttgttggctatatgaccttaggcaagtcacataactttgtgcatctgtatctttgcctacaaaacatggacaacagttgcaacctcaaagggttatgaaagcacacaaaactgtgtctgacacactgtaagcattattaagtgtgagttgctattgttaccattgttgtcacatctcagtatcccaacatgttgcttatcttaaattgaaaaggattaagaaatgttacttgctatttctacaaattctttcttggttattaaaatgtcatgtaagtagctttgtagcaagtcttgtgtatagtagttccttgctatatacctggtataaagacgaataagatgccctcttgaaggccacaacctagagatgtccttcagttacaaggcagtgtggtaaatactataagagtgaagcataagagctttgggagtgcaaagaaggaaacatctaactgcctgagagaatcaaacagaaagttttgcagcggaatggttgattggcgtatcttaaaacataaatacaaatagtcagaaaaagggaaggcagtaaaagctttctagatggaaagtatatacatacaaagttattaaggcacttttaaaatggtactttcagacagttgagaacagtttggtctagctggaacacagattgaatatgaaggcgaaaggagataaagctgaaaatgtaagctacatcatgaacagtcttgttgccaggataatgaattgaaccattaacagatgctaagaatgtgtgtaggccaggcacggtggctcacgcctgtaatcccaccactttgggaggctgacgctggtggatcacgaggtcaggagatctagaccatcctggctaacacagtgaaaccctgtctctactaaaaatacaaaaaattagccgggcgtggtggcaggcgcctgtagtcccagctactcaggaggctgaggcaggagaatggcgtgaacccaggaggcggagcttgcagtgagccgagatcgcctcactgcactccagcctggtgacagagcgagaatccgtctcaaaaaaaaaaaagaaggtgtgtgtaatattagctttcagttttatgcaagtcactatagtgacagtgtgaaagatggtcttcaaggagaaaatggacaagactggccgggcacggtggctcacgcctgtaatcccagccctttggaggccaaggcagacaaatctcttgcggtcaggagctcaagacaggcctggccaacattgtgaaaacccgtctctactaaaaatacaaaaattagccgggcgtggtggcacgggcctcccagctactcggaagacttaggcaggagaatcgtttgaaccggggaggcagaggttgcagaaagccgagatcgcgccactgcactcctgggattgattgattgattgattgattgattgatttagacaaaaggtctctgttgcctaggctggagtgcactggtgtgatctcggctcacagcaacttacacctcccgggtttaagtgattctcccaccttcgccccctcgagtagctgggactacaggcacgcaccgccacacccagctaatttttgtattttctggtagagacagggtttcaccatgttggccaggctggtctcgaactcctgagctcaagtgattcgcccacctcagcctcccaaagtggtgatcctgggttttaaccagaatagaggacataccactacccacttattgaacatattctaaataagttttcttatcctaaaatattttatattccaatattggaatcgcctgagtccagggtggtcaaggctgcagtgagctatgattgtgctactgcactccagcctgagtgacagagtgagaccctgtataaaaaggaaggaaggaaggaaggaaggaaggaaaagaaaaaaaattatagaaaatagattgtcggttgcctgcaggttgggggaggctgagagatggggagtgactgctaaggagtatttttttttaccttgaggtgataaaaatgttctaacactgatggtgataatgtttgcacaactctgaatattctaaaagtgattgaattgaattgaatggtgtgtaaattatatctcaataaagctggtaaaaatttagtgattcaataaaatcctttatttggtcaatgtacggtattctgtcagttgagacaaaagttaacattcgaatttagatttagattttatatcttcagcttcttctatctagaaaaggcattcactagtaattattaggatgattgtgcattgttatgtacagataaccgcagtgacttatctgatagtcctttaacagacaggagtactagtgtagttactttgtttttatgtaactaggtaggtcttatgtaatgtcttatttgtctgaatgaaagattattgtgtctttagcagaggaaaagagataatctctccgcactgaagattattttaatgagtagtataagtaatgatatacacaaaatgggaaattatcttggccttaatgaaccatgtattctacatatagagtatagaatacatggcttctgtaaataaaagtttccagtattggaatataaaaaaatttaggataagaaaacttatttagaatacattcgataagtgggtagtggtatgtcccctattctgcttaaaacccaggatcaccactttgggaggctgaggtgggcgaatcactcaaggtcaggagttcgagaccagcctcgtcaacatggtgaaaccctgtctctactaaaaaatataaaaattagccaggtgtggtggtgcacgcttgtagtcccagctactcgggagtctgaggcaggagaatcctttgaacctgcgaggcagtggttgcagtgagccaagacagcgccattgaactttagcctgggtgatacagcaagactctgtctcaagaaagaaagagagagagagagagagagaaagagagacagaaggaagaaaggagagaaggaagggagggaaagagagagagaaagaaggaagaaaggaaggaaagaaggaaggaaggaaggaaagaaacgcaatttaattcagttcaactgcagttgagcatttgtgggggtgggggcggggttgggatgaggggttggagacaagcccaggctggtcttgaactcctcgcctcatgtgatcctccctcctcagcctcacccaagtgctgggattataggtgtaaaccaccgtgcccagcaggacagtcaagaaaattgaaactggaaagtaccttggccttttaccccaaatctacacaattttacacagtggcagtgctttttcctctaacgctataatagaattctgcaggagaattctttcagggagttcaccttttgttttattagagagctaagtaaccttgggaggttgggctgactttggaagcttctggaaataaatgggggtttaacagatattaacttcatcccgccttacagataaatgccattttactttgaaaagcagtaggtgggggtagggggcgagaaatagaaaattccatcagtttggtgaaagcttttagaggataacgtactctgttccatgaaagaatcagaaatgtgagcaatgcagggagaagtaaggtaaatccagacaagcaggatggattccagatgagaaaccatatcttccatagtgaattttgaaatgaatttaaaatctcctattatataatctgcagtttactttgttttcttgttggagaaagtggtttttggagtccaagtatgcagagggcacctaggattccagagttaatgggactgaagagaaaaaagcgtaacctgacccagattctgctgctcaccgctccaaagccaaatgctagaggggaggtttggtgggaggaaaagctgcttttaatccgaaagccagcaaactgagaagatggaacactagtgttctaaagtaccaccttaaaatttaaattttaccatacggtttttgtgtttttgtttttttgttttttgttttttcctgtgacagagtctcactctgttgcccaggctggagtgcagtggtgcaatcttggctcactgcaacctccacctcccgggttcaagtgattttcctgcctcagcctcctgagtagctgggattacaggcatctgccaccacactcagctaatttttgtgtttttagtagagacagggtttcaccatgttggccaggctggtctcgaactcctgacctcaagtgatccacctgcctcggcctcccaaagtgctgggattacaggcgtgagccaccactccgggcctaccatagggttttatttatttatttatttatttatttatttatttatttattattttttttgagacggagtctcactctgttgcccaggctggagtgcagcgggcaatgtgggctcactgcaagctccgcctcccgggtttaggcgattcttctacctcagcctcccgagtagctgggactacaagcacccaccaccacacccggctaattttttgtattttttaatatttttagtagagacggggtttcactgtgttagccaagatggtctcaatctcctgacctcgtgatccgcccgcctcggcctcccaaagtgctgggattacaggcctgagccactgcacccggccagcaatatttcttctgtaaaagaaaagaataagtgttccacatggaaagaacccaagatatattaagtgaaaaatgtcatagcatgactacatttctgttaaaaaaaaaaaacaaaatgttatatatatatgcgaatgcagagaaaaaagaaatgtaaaaaatacaataaatttttcacggtgattacatttgcgagaggaacgtacagctttcatatttcattcaatggttaaaatggtactcaattttgactgacaaaacggtaatgatcagatgccaaaacgagtgtgaatgtgcataatttacgaaagacatttttgagaactggttacatgagttttgaaaataggagagcagaggacctgtgtaagatttttaaagagactgcactgtcacgagccacagcgttgtgagattggtaggaaagtgctccaggaaatatctaggggagggcttggatctgagacacagagtgtgagcctggtcgagaagcgggaaaagaacccgcccagagccccttctctccattccctcggcgaggcaggaagctatctgcgttccgaatcccgcgacatcaggattatctcgcactgcagcacagagaccaatcgctagtaacctctgcctttaattaggcgttttttggcccaaatctcgcggcttcgtaaaaatatcgcgatgcttccgcttttaatgtttttagtttggacaagccctttgagataaatttaaaagccaattctttttttttttttttttttttgagacggagtgtcgctctgtccccaggctggagtgcagtggcgcgatcttggctcactgcacgctccgcctcccgggttcacgccattctcctgcctcattcccgagtagctgggactacaggcgcccgccaccacgcccagctattttttttgtatttttagtagagacgaggtttcaccgtgttagccagaatggtctcgatctcctgacctcgtgatccacccgtctcggcctcccaaagtgctaggattacaggcgtgagccaccgcgcccggtacctaaaagccgattcttaaaaatatacgttggtaattgtttatgcctactgctgagatcaggatatctctaaagtaaggagaggaaaaagaaaagtatgtgtcagaagtgggattcgaacccacgcctccattggagaccagaatccccaccgcggaggaagcttagcttgagtctggcgccttagaccactcggccatcctgacacactgcataacagccctgatttttgcactaaaatagagatcaacaagcaatgattctgtgtcgtgcacgcacgcagaaacgcgatgacgtcagggttgcttggtaacagaagggcagaaagccacttgtggattgaaaaagcaaaagggttcgcaggactagaaaatgtttctgcataaaactggatcaagtctcttacgggccttataactgttatcgccatctcgaaaaacgtgtgcgggttttttttttttttttttttgctcccagcctgcccagatttcaggaaggaaagaagatcttttgcttcttcggtcgctgggtcggctctccagtgtctgatgtttactgaaatcttgatcgtggttagcctcccccaggacttcattgtttggaagatggtgaggaacaaaacaaaaccctaacaaaagaccccggttctataggaaggtccccttttagcccctctattttggttccatttgtcactgccttgccactcgtcgaagtttgtcttgggctctaaaagtggtagccgggaacggctgggaaggtctccacagggaccaccacatgggcaaggctggtgtccgcgccgagggatcggcgatcccaggtccggggaaactccgcgagcgacgcgctcgcccgcggccttccttgtcgctctcggatgttcccgattaatgggctccaagtgaccactgccaggtcggggaacacagcggtagtttttaaggggagtgcaccacatcgcctgatccacttttctgtttctcagccttcgccaagcaatctgagctccaggccgggaagccccaaggtcacaaattttaatggagccctgaaactaaacagaaatcatccctcccactagaacaagagcccctagaggccagcgacaccgctaaaataacatgtgtagaccaatgccgtccaggtaacagtgcctggcaaacacggtagaggttcaataaatacattttaactcaaccgtcttaactcttgtatttggggctgtgaggttcagatagaggaaatataaagttggatattttaattagattttgtcctaatagcttactttttgtatttgttaatataaaaaaaatttcctttttgtaaggcaaagttaggtctcttttctgcatggagaaataactgagtttcagtaggctctatcttaatttccacagacttccttggtttcatatcctatttttgatagagagaaaattagtagtgagaagtacagtgaacactggttccccagtctccctccaatacatgagatttgtatattttctttcgattggaaggaaattgtccaggaagtgattcccaacatggcaactgtaatcttaccctaactataattatttttttctaattgcaaagtacacacaaattgtagaacatacaaacatgtcaaaaattaaaatcatccataatctcactagtcagaggtaactattaacatttttatatatttagtctttcatatggtatacattttccaaaaatggtcatgtgtagtaaataatttgctaacttgctttctaaatgaatatattatgaatatatacttgctaagtactatattttgcataaatcttaattcctgcacatattccatatcaaagtggtattcttgaaaactggattatttctaattttttattttcatcagcaatgctgtaaaaactatccttacataaatattttcaaacatccacgattatttccttaaatttctaaaagtgaaaccattacatcaaattttttttttttttttttttttttgagacggagtctcgctctgtcacccagggtggagtgcagtagcacgacttggctcactgcaacttccacctctcgggttcacaccattctcttgcctcagcctcccgagtagctgggactataggcgcccgtcacgacgcccggctaatttttgtatttttagtagagacggggtttcactatgttggtcaggctggtctcgaactcctgacctcttgatccgcccgcctcagcctcccaaagtgctgggattacaggcgtgagccaccgcgcccggcctacatcaatgtttatccagtttttgtttgtttgttttgacggagttttgctctgttgcccaggctggagtgcagtggcatgatcttagctcacagcaacctatctcccaggttcaagtgattctcgtctcagcctcccgagtagctggaactacacgcatgagccatcacactcagctaatttttttttgtatttttagtagaaacagggtttcaccatgttggtcaggctggtctcaaactcctgacctcaaatgatgtgcccgcctcggcctcccaaagtgctgggattacaggcgtgacccaccgctcctggcacattttaataggtaacaaatgatatagcgcccccccttttttttctgatttgattattagtgaggtccaatattcatgtttaaaggatttttatactccttcctcagtaaattgcttaccaaatttttatgaggtgtccatctttccttattgatttgtaagacttattttatgaaaagtaaactcttgggatacagtttctatttaccaagaacccaagcagaaattcctatctcttattaacaagaatcccattatgtcccttaaacatttagttacttccatcttacagaaactagaagctatacaattaacaatgttcccatgtcaatttttaaaacccaactgtggcccacatttagtgtcctcgtagttttcatactatagattcacttctaatcctggtcattttttgtgccatctttttttttaatgagacggagtctcgcactgtcacccgggttggtgtgcagtggcgcaatctcggcttgcttcaagctctgcctcccaggttcaagcaattttcctgcctcagcctcccaagtagctgggactacaggctcgtgccaccatgcccagttaatttttgtatttttagtagaaatggggtttttcactatgttggccaggctggtcttgaactcctgacctcgtaatctgcgtgcctgggcctcccaaggtgctgggattacaggcgtgagccaccgcgcccggctgtgccgtattttttctttcttcctttatggcatgttaaactcctgatgtcttgattttatgggtttgttttggttttttttgagatggagtcttgctctgctgcccaggctggagtgcagtggtgcaatcttggctcactgcaacctccgcctcctgggttccagcaattctcctgtctcagcctcccgagtcgggattacagaaatgcaccaccacacctggctaatttttgtatttttagtagagatggggtttcaccatgttggccaggctggtcttgaactcctgacctcaggtgatccgcccgcctcagccttccaaagtgctggtgtgagccaccgagcccagacatgattttatgttttaaatggctttaagtcctttttggaataaggtaaaatataattaaatatgtcaatattttaactatttactaataatatttattgcacaataagactccccacaggccattctacatttttatgaaaacatctgtaagaggaattttaaaaggcctgacaaattatttaaagagggaagcagagggactaaaaaggaaagaagctaacaatggcggtctatgaaaatgaaataaacaaaacaaaaaaacaggatttaatttccaaccttgaaatgagtcccttgactgttttgtttgaggttcatataacttggttttctggtatgtccaggattacgtgagagtaacagagattggggtggaaattgagatgatgctgtattcaaatgagactgaccataaattggtagttgaagttgggagatgatataggagggttcgctgtgtattttcttcatttttgtatatggttacaggtttccatagtgaagagttcattcaatacagaaaaaaaaaaaatcaccaagtctcatcaaaagcatctatgctaatattttggcatatttcttcccagtttttaaagaaatatgtaggttcaaatctttctaattctcacttttttctattattctttttgtgcatcagaaccctaaaatgggtttggcaatcacatcccatacaaatccaagttcttcacatcctctaaacaaagaatctggtagagatgtgtgtatctctaaaggttaccttcaaatgtcctgcttacatttcaaacttcaaatgcaaaattaattcaacagataagccagatctaagaaatgtatcttttctccaacgggaaaaaggaaatgtaatggggcaatactgtcaaatggaagtactatttggcctggcatggtggcccatgcctgtaatcccaacactttgggaggttgaggaggaagaatcccttgagcccaggagttcgagcctgcagtgagtaataatcttgccactgcattccagccttggtgacaaagtgagaccctttctctaacgctggtttggttgggatttattattactctcacagacttcatataggaggaatttctggtttcaacaaagtgcaggatttagtaatgtgcttatatcattaagtcaaaatttagtgcaggacggagctagtgggcaagtctcttagtctcaagaaaaagggcactaagaaacatagcccaggcatttaggcttcctcttacattactgtggtctgcaatgaggtctcctggagcacaagtttcacttctccccagatcatctttagttgtactctacattttttcacgttattttccccctctcctaattaacttttcaaaggatagaagccatgctctcttgtattctcttcaggagcaagttcagctggggcacccaacactggctgaattgtctatttgaataaaagaatgtttttcatttgtgaagaagcaactcaaccaccattggtatgctaagaaccttttgagttttgttttttattttgctgggaggagatacgtgatttccacgtatactctttggtctgcatctcaggtaactaaaggaattagcaaatggctctcatttaccatctgacagttatttgctcttaatttcatagtgcctttaagtgttaggctgttacatgcattctctcatcttctcacttaattgtacatggtggagggtatgggccatgttcagtttccctttattctttgaacctatctcttctaggccttgtctgctcttggggaagatggtcttctttgcatgttggcctttatcagaaaaaacaagagcacctgaagacacacaggcatgtgcacatacgtgcatgcacaaacacacacttcctggaacagcaaaagaattaaggaagaagttattgaaaccgtaatgtataattaacaattgcagatgttctgaggaaagagaggggagtcaaaggaatcggagtgggccccatatgtctttagtgactcaattcctgactcggtgaactcaaaagttgcttacctttctgcagatgagtaaacttagaatcacaagttcatttaatcccattcaaaatggcaggcttttaaaactaaaaatataaataaatacctataaacacaccacccacaagaactagaagataaccaataacacatgttgtggggcaggacctgatgtggtcatgtgttccatctcagtttgaatcctggctctgctgcttcctagctgtgtaccttggataagtcatttaccctctctgctgcagtttatctgtaaagtaagacaacagtacacacttgataaaattatcatgagcattaaggaagctactgtgcataaaactcttcatatgatgtgccaagcactgctctatgtttgttagtagtatttatgtgcctgtatatatattaccgtatacatttagatctcagaatattcagcaaaagctaatctagcctcatggaagctactttctatagccctggttctattatttcccttaaaacctgatgaataaatgaagaattaggacatgatatcaccaactcatgaacctcagccatggaaccccaatgcctggcacaatactacaaaaaggacttgagaaaatactttcctagtaaaattacaggattaaccaatataagaactgtaggcaggccgggcgcggttgctcacgcctgtaatcccagcactttaggaggccaaggcaggtggatcacaagggtcaggagttcaagaccaccctggccaagatggtgaaaccccgtctctactaaaaataaaaaattagccgggcgcggtggtaggcgcctgtagtcccagctactcaggaggctgaggcaggaaaatcgcttgaacctgggaggcagaggttgcagtgagccgagatcgtgccactgcactctagactgggcgacagagcaagactccacctcaaaaaaaaaagaactgtaggctatgaatgtccaacactactttcttagcaccactagaaagtagtgacatggcactgagaaagtggttttattttccagtttgaagtaaactattggccagagtgggatttttgcacccatatgggaaagcaacaccattaaccatttcctccccacacgcattccaacatctgaacccaatcctaccaacacccagaaagcaacaacaatgtaaacatccatattcagtttatttttaaacagaggggcacgtacccacagagaagcaggactgagaaccatcatgggggcttgcttgaagtgatctgccccagccttctgacttcagagtgtctcatgatccaatggccatggggacggagctgccccttgataggatgcacttaagcatggtcaattcccccttcccccaaaggaaatggagaaaaggagccaagaagtcaatgaatccctggaatattgtcccagaatccttccagggatggtatacgactggccaccagtccacaaatgtgactggtaagggatctagtaacagaggatggagttgggcagaatattatcctggatgatatgcacccagcactagaatacacctttcattagaatgaagagaacagacaaagccctcagaaaagatacaaaggcagagacattgattagaacattatctcataacagaggtggggccattacccaccattattgtaaaataactgtaactaaccaaaacacatacaggcttctttaatggagttaataaaactatggcacattgggaatcaggggcagaggtactgttcccagacggaaaactgggataaagggagccatgctgacagggccttattccagtctaggttgttagaaaggagccctagcccagaaatgacagcaaatagccataatcattatgtggggctgaaccagaggaagccaggctgagccaagaagctggaagtatcttgaacggctctccaaatccaaagattatccatactctttatccctccagcgatgtgtaaaaccagaaagtatgaaacactggaggtggacatctggtttttatttctaggatatcttgatacatctcattacatttcacaatctgcatgggaaggaaaaggatggtagagaacatggacatcctgtctcccactgcaagggcgtggaacatggtaaggatacccagctgtgacaggacgtggcaaggcaacaagatgccttgtgcctggcgtaggattacagccaacagcccttttggcctgaattcacctcctcaaggggaggtctccatggaatgaccatgattcccaacatggccagaaaacccatctatcccactcatggggcagatgatcagaggagctgcacttttccctcccgagtaactcagactgaagtagggccggacaggcccacaaaaggtagcatgagagaaagtgaaggtgtgacacctctctgtcacgttgtagaaggagacctcaccagcatcatagtccaagaaaatccccacccgctggagcggggtccgcaggggtagggcagtcattggggaggtaagagcccaatattctttcccataccacaaagacactgcccagaatccattctggggggctgaggttactccaccttttctgcacactgagtcttcacagacacctatggtccacttggctttatctcccacctctacctcccaataatgtctcccggcgatgaagcatggagagcccaagacacagggaaacagattgaacctctcggggttgtcaggcaggtcctgttggaggtaactgtaccgcacttgccgcagattatcagagaggatcaggctggggtaggccgtgtctgggtccagagtcacgtccactgtagagacacaaggaagacagtcagccgtgggccaggagagcctattttagaacacccagcgcctttctactacctccccaataataagaggttcccactggaggttgcacgtattttatttagaatatattctaaacttcacatttcaaaaattactgcttggattagctggttaccagaatactctgaaaatacagaattttagccccgtatcttttctttcacatctgaagccacaatatccatcatgaactgattttaagagatagggtcttgctctgttgcctaggctggagcgcagtggtgtggtcatagttcattgtaaccccaaactcctgggctcaggtgattctcccgcctaagacacccaagtagctgggaccataggtgtgcactaccaccctaattttaaaaaattttttgtagagatgaggtcttactatgttgctcaggatggtctcgaactcttggcctcaagcaatcctcccacctcaacttcccaaagcaatgggatttcaggcatgagccactgtgcctggcagatacgctgaattgaggttttcttacacgctcatcatcccttattctgaaaattccaggggccccaagtttcatagaattcagaatattacaggttttagacaggcagcattctataatgaagtattaatagatctgctgtgagattcatgaatgtttacataatgaaggataaaggctctaaacagtaccacataaattcaggttttgatgctataattaatttcccacaaaataatgaaaaaggttttggctttcagagatttgggattttagaactgtgggtaagggactgggaacctgtatcagtatgcttactttttaaatcactcttttaaaattattttttacttttttttattttttgagatgaggtctcactctgtcacccagactgtagtacagtggcataatcatggctcactgcagacttcccatttcagccttccaaagtgttaggactacaggtgtgagccactacacccagcccaaatcactcttttatccattctataagatctttactctgcacatcgaagctctattcatcttcttctaatgtccagtccaaaacacacatcctccaagtttttcttaatctgcccaggccattacacttactgttctgaaatctaaaactgtgtatgacccatgtcatctcctctggcatttagtattacagcatcttgctatcatcaagtgttttcctgcttcaaaaacactgataatgggctggatatgtggctcatgcctgtaatctcagcactttgggaagctgaggcaagaggattgcttgcatacaggagtttgagaccctgtctctacaaaaaataaaagtaaaaaaattaggcaagcatggtggtgcatgcctgtaattccagctactcaggaggctgaggcaggaggatcacttgagcccaggagtatgaggctgcagcaagctatcaccatgccactgcacaccagcctgggcaacagagaacctgcctctaaaatgaataataaaaaatttaaaaaattaaaataataaataaataaataaaaatactgatatgtattctctcatttgctcctcacatcttgttcaggaggaagagtcccaaacattacctctcagaaatttaagcccacaaatttttactcccacaaaagacaggcaactgatagaggtaaccaagaaccccagaacccttggctcctggttcaacaatctgtctacaacagctgcctaccttcttcttgtgtcatgggtatacctccaaccagacaatgtaaaccccaagagtaggatgacttatgctcttctgttcctctaaaataccctgcacaatgttaggcagtgtaggatacaagcaaagtactcatttaatacttgttgaaaataaatatggatcagagccactgcacaccaaggactgcagatccactgtatgtagagtccttctcttcatttagaggataattcataacagaaggtgactgtgactatgggacgaatacaccttagatttgaatacttctgcaatgttaaatttacccaggctctatagtagggtgaaagcggttgtgagggggaagggaagtttcaaactttgctctgaggcacagtgatgggatgacacaagactcctagacttcctctagcactcaagagcactattgtggagctcaatcagtcctgcttgtcacaaaccatggtttgaccctgaagctgggcgggcagagcagtgtactagtgtaccagctctgttctacttttggggaactgcggtttccaccctataatccttctttaacacctgagattgattttaccctatggcttcagctctgagacatttcaggaggcaaagatactgttaacacatagaaacaactgaggatttttgtggttgttgtgtatcatctttatacatgtaaccaaaagaatccaaatctaagcaatttccaaatcattcataatagtagttaggttcacaaggatttttactccttaccctaatatggttttgtctctcatcacctacctgagtataactgagcctctcttaattctgaaagaataaaagagcaaagttatggaagtcatgagggtttccaggaaatacataactaagggggctttggttagtcatcataaagcagtggtctccaccagaaaccccagaacctctgttgttagtcatgcactaattttttcatatgatgtatggctctatcatccaaccaaaagctttaaggggagagggattgggaatcttaagtacagggataaccacatgcctgagactggtagaatatgggataaaactgagccaagatcaagaattccaccttccagtgagtcagctgattctgcagagggaaacgcggttccaaccccacgtcatacataacttttgagttgcataagtcatctgtgtacaagagctgaatggctcaagtgacactcactgacactctggggtaaacatgaccattcatttataaggcactttatagttgaaacagaatttctcacacattatcccactaagacttttaagtggcaagaaaagaagagccagatcaaggaaagtcatgcctgaactaaccacttctggtattatccactgtattgagtggagtttctccccatttgtcttgcttgtagaggacatgtatctgctagctctatgttgctagatgccccaaaaagtatatatctgaatagatgcaatgcatatatgaacccagcatatacaaaatagaaaattatcaaagattgtgggggtttgtaatttctaataattaagagaagggtttacctacatataaggatttcagaatccaccagactgcccaggaattttagtattcctgggtggaataatatatggccaactctttactgaatgtggctcgtgagcagaaaaattttaatttggaaaagcttctccaaatgcctagaacgatttaataaacataaatataggacttattatgtgtcaggttctattctagaagtgttagaaatggtaactaaccttaattcttatacctcaggaggtaagaactattactgttctgttacagatgaggaaattacttgttgaatccttactaagtggtagaggcaggcccagaacccaggcagcctgactcctgactgcccgctcctaaccatgtccctggcggtgctgcctgtcagtgctgctggattcctccagcccgagctggcacctgtgcccacaagcagtaggaactcagtaaattacaatgataaacactggctcaagtgaaacgtatccaaggtagtttttgttcattctttccgaagtaaacaatcaaattaattctggattgattaatttttggattgcttatttttctcctccatcaatgcagactgcgaattgactaaatacagttaacaaacttcaaattagaacaagaagctgttaattgagaaaattaattaagaccaaagggaagatgtaaaatatcagggaaggctggccaatgggtatcacccttatcccacgtttcccactttcagtgcagatgttcttttttccaagcaactttacatcaaaagcccagtaggtagataaatttaccttggattttctccatatctgactgcattttttctaagaaaagaaaacaagaaaatattcagtctgcatcccactatctggctggaaaattatcctcttcatcaggcaatatgcagatactcagtataaatccatttcccctcatgacacctctcctcacattacctgtgaactgctttagactctccgtcaagaatagacatttttgggcaaaaatgtggattttctcttgcaaatctggaggtgtgatccaaggttcaggaatcctgattctttcagccctaaatttaaaaaacatgagtaaattttttttttttttgagatggagtttcgcttgttgcccaggctggagtgcaatggcgccatctcggcccaccgcaacctctgcctcccaggttcaagcgattctcctgcctcagcctcctgagtagctgggattacaggcatgcgccaccatacccagctaattttgtgtttttagtagagatggggtttctccatactggtcaggctggtctcgaactcctgacctcaggtgatcctcccgcctcggcctcccaaagtgctgggattacaggcgtgagccaccacgtccggcccaagtaaattctttttcccaattccatgaccttccaggaactaggacaggggctaagttaaactgtctagcgtacacggacagtctttaaaatcagccactacagcttttcccaccttctcttcctgagctatgatcctctagaccaaaataggatactgtactcattctcataccccccaaagcacctagctcacagcttttcaaatactaagtactcaaaaaggtttactgaattacatatgaggctgactttgccagaaagcactagattccatgacagtccttgatatttatggtgggcaattaacccgaattctcaggttcccaaatatggaaagaatgacatgttcagatagaaaggcactgtgggggacattacccaattccctagccctgcaaggatgtctatagcaaagactgccagttgcctatccaataccccttctgccatcttctgccttttatggctcacagctgcccagtccctcatagctagatgtgaccttgtgactaagttctggcctatgagaagtaagacgtatctcatggtgttttgagaaatctacttaaaaatgtaacatgacaggaaacagtggctcatgcctgcaatcccaacacttttggaggccaaggtgggataattactttgaggctaggagttcaagaccagcctgggcaacatggtaagaccctgcctctacaaaaaagaaaaatgaaaaaaaaaaaaaaaaaaaaacgaagaaaaaaaggtaatgtgatgcgacttatctccttcttcttggttggcattctaccagctattgtggactatatgaggaccataccttagggatggtagaacagtgaatgggaagaaacctgagtctctgaggatcactggagttaccacactagccacagactacctacctgcacatttcttacttttttttttcttttgagagggagtcaggctctgtcgcccaggctagagtgcagtggcatgatctcagctcactgcaacctccgccacaagagtttgagcaattgtcctgcctcaacctcccaagtagctgggattacaggcatgcaccaccacgcccagctaatttttgtatttttagtagaaatggggtttcaccatgttggtcaggctggtctcgaactcctgacctcaggtgatccacctgacttggcctcccaaaatgctgggattacaggtgtgagccaccgcacccaacctgcacatttcttttattatgtttaagccttaagccaataaaattttgggtttcctatcttatatagccaaattcaatccttaatgtcacaaactgctagggtctgaggcagctaactctgtatgttaggtcacagctagactggcatcataaagtatcaggtaacagtattatttgcttaggtcatctggctgggactggtatgaactccaccttatctccatcctaggatccctcaggaacctcaattccatcaacatgattctatcaacacaggcctcccagccaaactgccccatctataaggacctccccaatctccttaaatgctcccacatagtcaagctgcattttgctttagaaggttttcaccattcaggatcttaatcaccttcacagtacagcttcctcaaagtcagtttccacccctgaaggcattcttacaccaaacatgagcttcccaaggcccatcccacttgcctcgtcatccatcctgcaaaacaactttgccctggcttactgccccctccaagctctccctctttgatcgtgttccagctgccagggagttcttcctcacttttttttttttgatggaacatagagaaatagcaagagtaagaataagagccagaatccaggtggctcatcagtaattatgtaaatgcaggccagtcacacctttcttaggctttatttcccccattacagaaaaaaaaaaatgagataatgaagggggaaaggattctgaaatgtataggaagcaatagacataaactacccttatattcagcccaggtccctgtaaggccacaccctctccatggaagtgtcctcatacccctaatccaccggcagcctcccacatgaaccccctacttcctgaattttactgagtagagctgtggttcatctaattctttgtatactagtgactctcttcagggatatgtgtcaatttgataagatgtccatcctcaggctcagggctcctttcaggatttacaaatgtgaaggagacagtcttctcatatttgatttaacactagggaaacagaaaactatacctgctcaatgtgtccccaatgtcctgcaagagaaaggaaaaaaaataaccatgagaagtcatttaaaacttcggttttctttcacagatgtttgttgaaaaaccaactacagactggctctcatgggagaaattagggagaaaaggatcactggaacataactcagtgttgaggagctaaaaggcaggcagaggaaaatgggatgcatactatttgctataccagcatttcccataccctccttcagtacccaccatccactggtcaaggacctcaggatttcaaatttactaacttaagcgtcctatgattggacctcaagcttgcctacctgtccagcttgctttctttttattatgaaataatttcaaatacacggaaaagctgttagtacaaagaactccagtatactttttttttttttttttttgagacggagtctcgctctgtgtagcccaggctggagtgcaatggcgcgatcttggctcactgcaacctctgccacccgggttcgagcaattctcctgcctcagcctcctgagtagctgggactacgggtgtctgccatcacgcccagctaatttttgtgtttttagcacagacagcattttgccatgttggccaggatggtcttgaactcctgacctcaggtgatccacccacctcggcctctcaaagtgctgggattacaagtgtgagccagcggtggcctctcccttctttcatacacaaaaagtagcatactcttgtcaggcgcggtggctcacgcctgggcaacaagagtgaaactctgtctcaggaaaaaaaaaaaaagtagcatactctctatttcacatttttattttccacaaagcaatatatactgaaaaccactccgtatcagttcataggtatcattcttttcctttttttaacttggatagtattccatagtgtatatgtgcataattaactaaaacaatcttgtaggtttctaagtcagactatttccagtattttgcaattataaaaatgttgcagcaggttatcttgtgcatatgtattttcaaatatattttaatagttatatcttcaaagtaaattcttagatttttaaaattttttattgatacgtaacagacatatatattttgggggtgcatgtgataatttaacatgttcataatttgtaaagaaatcagtgtattgggatatccatcacatcgttaaatatttgccttttctttatgcaagaagcattgcaattattctcctctagtcactttggactataaaataggccaggcgcagtggctcacgcctgtaatcccagcactttgggaggtccaggcgggcggatcacctgaggtcgggagtttgggaccagactggccaacatggagaaaccccgtctctactaaaaatacaaaattagccgggcatggtggcgtatgcctgtaatcccagctactcgggaggctgaggcaggagaatcgcttgaacccgggaggcagaggttgcggtaagctgagatcttgccattgtactccagcctgggcaacaagagtgaaactccatctcaaaaaaaaaaaaaaatatatatatatatatataatatacgtatgtatatgtgtgtgtatatacatagatatatataatagttttgtaaactacagtcaccctactgacctatcaaacactagcttttatttcttctatcaaactgtatatttgtacccattaatcaatctctcatctctcctccctctacccttcctagaaaaattgttaattctaactgtgtgtatacatacacacacacacatacagttttgttaaatattgagaaattctcctccaaaagggtcatgattttgcattcctaccagcccactggcatatgagtgtctctccgacacttcgtcaaaagtgtattaagttgaaaatttttgctattgtaacgagtaagaaatggtattttagtgtggttttagtttgcatttctcttattataagtacagctgagcattttttcacatgttcacaaagcaatttatgtcttttgcagcttgtctatttgtgccttcaacccatttttctctagaattttggtcttttctctcgcaatacttaaaaggtctttttatattagaactatcacttgtatttgtgatatttgtggcaaatattcaattttaatactatcttttgactggttacaatgtgtgtgcgcttttttcttgtactaataccaacagctttaattatatgggctttaaaatatggtgtagtatctagtagggccagttctccctcagagctcttctttcacagtgtagcctacctatgttttttttttttttttaagacagagtcttgctctgttacccaggctggagtgcagtggtgcaatcatagctcactgcaggctcaacctcttgggctctagtgatctatcccagcttttttttttttttttgagacagagtcttgatctgcctcccaggctggagtgaaatggtgcgatctcagctcactgcaacttccacctccgggttcaagagattctcctgcctcagcctcccaggtagctgagattacaggcatgtgccaccacacctggctaatttttgtatttttaatagcgacggggttttgccatgttggccaggctggtctcaaactcctgacctaatgtgatccacctgcctcggcctcccaaagtactgggattacaggtgtgagtcactgcacccggcctatcccataaaaataagcacataataatatgtgcttattttatatgtgcatattattatgtgcttatttttctatctgaagttgactgtcaatttgtctagatccagaaaaagagcttgttggtatttttattgaaattgcaagggtggggggggggggatgagggataacagattacttaatgggtacaacgtacactgggtacctgggtgatggttacactgaaatccgagacttcactacataatatatccgagtaacagaaaaaaaaaagaaactgcatttatgaatgtgaaggacaacttgctttccctgtcttatcaaagaataagtgatatctctttatttgttcaagtttattttgtgtctttcaggaatctttgaatgttttataattttctccacataggtttttgtatatttcttataaatttattcccagatattttatcacttgttttttttttgcaaatggaaacagcatgttctcttctaatatgtcttctagtggctgctatctggcatatgaaggctgctgatttctgtatgttaacttctttcccaatttgtatacctataattattttatttaactgaactggttagaacctttaatgcagtgttaaatagagataaatgatactgggcatccggcctgtttctgacctcaatgggaatgcctccagtattgccccattaagtaatatttatcctgcttttccagtgacttccaacataaacactttttgatattcatggagcccctcctcccttactgagtccatgacttctttctttctctcctttcctcatcatccaccttcagtttcatgctccatctgtttaaaaaaatattcttaaaaaaaaaaaaaaaaaaaaaaaagaagctttagaccaggcgcagtagctcacgtctattataccagcactttgggaggccaaggtaggcggatcacctgaggtcaggagttgaagaccagcctggccaacatggtgaaaccccatctctaccaaaaatacaaaaattagctaggtgtggtggtgtgtgcctgtaatcccagctactcgggaggctgaggcaggagactcactcaggaggtggaagctgcagtgagctgagattgtgccactgcactccagcctgggcaacagagtgagactttgtctaaaaaaaatttaaaaaaaggttttaaagccttaattatggtgcttgcttcagcagcagatatcctcaaatgggaaccatgcacagattagcatggctcctgcacaaggataacacacaaatttgtgaaccattttctactttttgtgttcaatgttcacagcagcactattgacaatagccaaaaggtgcaaacaaccaaaatgcccatcgactgatgaataaacaaaacatattatatatccatacaatggaatgttattcagccataaagagaaatactgaaacatatatatatgtactgaaatatatattttttcatatatatattttttgagatggagtctcattctattgcgtaggctggagtgcaatggcacgatctcggctcactacaacctctgcctcccaggttcaagtgattgtcctgcctcagcctcctgagtagctgggattacaggcatgcgccaccacgcctggctaatttttgtatttttagtagggacggggtttcaccatgttggccaggctggtctcgaactcctgacctcgtgatctgcccacctcggcctcctgaagtgctgggattacaggcgtgagccgccgcgcctggccagtactgaaacatattacaatatgaatgaatctttaaaaaaatatgctaagtgataggccgggcgtggtggctcacacctgtaatcccaatactttgggaggctgaggtgggtggatcacctgaagtcaggagtttgagactagcctgaccaacatggagaaaccccgtctctactaaaaatacaaaattagccaggggtggtggcgcatgcctgtaataccaactactcggaaggctgaggcaggagaatcgcttgaacctggcaggcggaggttgcggtgagcggagatcgtgccgttacactccagcctgggcaacaagagtgaaactctgcctcaaaaaaaaaaaaaagtatgctaagtgaagaaaaaggctacgtactgtatgatttcaattatatctaatatctagaatagactaatccatagagccaggagttaggggtagaaggaaatgaggagtgattgcttaatagtgtgaggtttccttttgggtggtaaaagtgttttagatccagacagtggttgataatttacaacactgtggatttactaaatgctactttgtgccagagttttacactttaaaatggtgaaatttaggttacgtatattttacaattaaaaaaatgaagaaggctggaaggctggatgtggtggctcacacctgtaatcctagcactttgggaggctgaggcggatggattgcttgagcccaggagttcaagaccagccgaggcaacatggcaaaactccatctctacaaaaattacacaaattagccaagcatggtggtttacgcctgtagtcccagctacttgggaggctgaggtgggaggatcatctgagcctgggaggtcaaggctgcggtgagccatgatcatgtcactgcactccggcctgggtttcagagtgagaccctgtctcaaacaacaacaataaaaactaaggaaaaaaaaacactcaagtccatcttgcaaaaccccaatcctggatgagactgaccatctgcttactcagtgcccacgccagagcagtcaagatttgagaaagcaaagctgataagaaagttacacgacaggggctgggcacggtggctcgcacctgtaatcccagcactttgggaggccgaggcagaaggatcacctgaggtcaggagttcaggaccagcctggccaacatggtgaaactccgtctctataaaaaatacaaaaattagctgggcgtggtggcacatgcctgtaatcccagctacttgggaggctgaggcaggagaattgcttgaacttgagagggggatgttgcagtgagccaagattgcaccactgcactccagcctgggcaacagagcaagagtatgtcttaaaaaaaaaaaaaaaaagaaagttacacaacagggcagaatggttacactataaatagatgttcactgaccaaatactcctactagttctcgcaaaccaactgtctttcccatactctgaaacaatcatttcttcccatacaacagaagactctctgacactaattcctggcatatgtactttagttctcatttccacctgccttctcaggaaccgcacattgctgatcagtacatggtttctttcttcctttcttttttttttttttggagacagggtttcgctcattgcccaggctggaatgcaatggcgcaatctcggctcactgcaaccatcgtctcactggttcaagcgattctcctgcctcagcctcctgagtagctgggattacaagcatgcgccaccacacccggctaattttgtatttttaatagagatggggtttctccatgttggtcaggctggtctcaatctcccgacctcaggtgatctgcccacctcggcctcccaaagtgctgggattacaggcatgagccaccgtgcccggccagtatatggtttcttgtggcttcagtgttctccctcacctagaaaccttacaacatatactcctttccatacgtattttgaaaatatgtctaacttctagtttctttaaccaacccttccagataaaactccataatcctgtctcgtctctaagtattttattacaaccccttaacagttgtacttgaaatagtcatctacttgtgtagtctccattcacctgacctagtcactactcaactccccctaatgtggctcctgccccaattattccattgtgatagttctacctaagatcaccaatgatggtcatgttattgaatcaaatgggtatcagctttgatattatttgacctcaactgcattactatgctgtccactcccttcttgcttcgtctcaaaaataaaaaaagaaaaaaagaaagaaagaaatacatttttctgatttttaccatttaaaaatgtaaactggcctgacgctgtggctcacacttgtaatcccaacactttgggaggccgaggagggcagatcacgaggtcaggagtttgagaccagcctgaccaatatggtgaaaccccgtctctactaaaaatacaaaaattagccagccatggtggtgtgcgcctgtaatctcagctactcaggaggttgaggcaggagaatcgcttgaacccaggaggcggaggttgcagtgagccaagatcgcaccactgcactccagcctgggcaacagagcaagactcaatctcaaaataaataaataatattaaattaaaattaaaatgtaaaaaccatacttattgcccaggacatacaaaaacaggggatggaccataatttgctgacccttgccctatgccatcatccatttttatttttattttttattatttatttatttttttgagacagagtctcgctctgttgcccaggctggagtacagtggcgcgatcttggctcactgcaaccacttcctcctggttttgggcaattccttgcctcagcctcccgcgtagctgggactacaggcacaccgccatgcctggctaatttttgtatttttagtagagacggggtttccccatcttggccaggctagtcttgaagtcctagaccttgtgatccacccgcctcggccccccaaagtgctgggattacaggtgtgagccactgcacctggcccgccatcatccatttttaatggcttttatcaaatacctataagaactatctgatcgccacactaaaatataattcaggaaagcttatttggcacttaatcccagtgcctagaatagtgcctgacacaaagcaaataattaatacgcactgaatgagcaaacgacagacaggcattagctcatttcctgtagtcttgccggggtaggtctgctgcagctttatcacctgctctaccaaggttaaatcacaggactgctcaggtaacctaaccactcctgctcaagtgctcattgttttgtggctatagtaatacattaaaactacaggatactggagtgaggagagtctttgaatgacatgtggtctaagcccctcattactgaacaaatgaggtcactgaggcccaaaaaggttgagagccttgcctgtaatcagaccacttgtcagtgctgtgtaggcacaagcaccaggtcttctttttgccatttctatgagacaacgcaattgactaattcaagttgtgtgaaccagaacttctagtttacacagtttccttccaaggtgcacaatatagagtttggcaagctcttgctattcctgcagagttaaaaagaagacagggggtcctggatactacttggcaaaggagaagggacgatattttcagtgggtgctgctctagcagggctctgcaagccttacctgcaggagctccctggtgggctgctgctgcttctcttctagctgagcgatcaggctgctgaggtgggagatgttgcaagagaactgggtgatggcaccattgatgctattgtagatggccaagtctagctcctcaaggcgggccaggaggcgatactcatgctcctttaaggagtgatacagctgctcaaactcccaaacaatcttctccctctccatctgggttaggctctatgcagacgacagggaaaggcagtaaagagaaaaacggctcatttctagggccttcatagttctcctgtgaccatgtagcccaagacctcattatggattaaaacaagcacagtgctaactcattatttccagtctttactgactggatatataatgcccaggaactgaattaccccagtgattattaagacatagtccctgttctcaagcaactcagagaagtgagtcaggttcatatgatatacatagtcatggatgggtaattaaagatagggtgacagcctgcaatgaaagaaactggtaccatcttcacagaagcaatttcacacaatgttcatgtgatgaacaagaattcaccacataggcaatgagcgggaagcctttccaggcagaagaaatggcacaggcaaaagagtggggagagaaagcaaatggtgctatctggctggagcacatgagtgttgagggaagggaccagaaaaggtaaggccttgtcatgcctggcctgggaggctgggggtaaggactctatcccaactgggaagcatggaagattgtcacacaggaaagtgacagggtcagatatgtgccctatggaggatggaacaaccaataacagcttccttgcccaatttccctgggcccttcatatgtaatccatacccgctgtctgtccttcacgggtgttcaccaactgctgtctctagctttgggtaggagggggagaggtgctctccccacgattccctcttggcgctcatttgtttgccataatttactgtccttcgttcttcacccaacccccaccaccaacaggactctattataaacttttgttctaaacaaggagccaggctgggcgcggtggctcacgtctgtaatcccagcactttgggaggctgaggtgggcggatcacctgaggtcgggagttcgagaccagcctaaccaacatggagaaacaccatctctactaaaaatacaaaaattagctgagtctgttggcgtacgcctgtagcctcagctacctgggaggctgaggtgggagaatcgcttgaactgggaggcagaggttgcagcgagccaaaacctcaccattgcactccagcctggatgacagtgagaccctgtcttaaaaaaaaaaaaaaaaattcccatatacccctaatataaattaacacatcagccacttgttaaggccttgagactggaggaagagggcagagtaaaaaattcagaattaaggcattgttaagaaaggagaataagccaaagagaagcaacagtggggattacacaaatccactattagcaattgtctgcagaatggtaccaacgcaagctaactgtatccaataattttacctatctcagctttgccaaggatcaaccctggtctacgcagttagcaggttaaagtaaactgacaggtctgatttccaagggttccaaacttggcttctccatgctttccccaaaagtaagggaatcttagttctccgggtgagttcccactgccatgtgcggttgatccacctctacctacaagttctgggtgacatgctggacaagtttaagggaagtaacatcagctctacagaagaggagagcaccagcagaaccaactgtgaattccaacaacccttaccaagagttcagctcgtgcctgttccccctgggcccgacgtctcttctttaaatctttcactctttttaaatggtcgagctggttctggatttgctcctgagaaaagcaaaacagatgggcagttcaaaattaggtagaccttagcatcagcatggtacttcttatcacacatggagtccacacacctgatgccaagtctccagttggcgcttgtccttaggccacactgccacccacaagagactcagggcgcaggggcaaacaagccactcctttggcaatctgtgtctatcttagcagcctgtggcttcaaccactcagctacctcgtcaggactatttgtgtctatcttaaacaatgagtcatctacctgtccctggtaggatattgcatgacttagcggaactgtgactggagtaggaggcttagaactatgttgtattgtagctcttccatataggtacactgtgaaagtgacttatttccctcatgtgtgaaatgggcaaacaccatcttcccaacctactcaagagttctcaccagagtgagtgaaataatatagctgaaaggtccataaatgttaagtgattgcacatgaatgtactcatatttaaacacggacataattgtgtacgcattcctgaagccctcaacgtacagaaaatacacagtatcatggactccttgaaggtcaccttacaactgttttatatgtaatactttgtttccacgtttctgtttagctgtgccagttcacaaagggctctgtgagtcacatgattccacaatattcctcataactgtgttatctcctgagtctcagagtggttaagtgacttactccagcagcgaaaagctgttcttttctgtgagtttctagaccaggacggattgcaggaaagtgctggggaaatgcttatagactaaggaatgggcataagtcagttaacgtccaactgcgttttgtctgagagccgatgggagtaagagtgtctgcagcttgtcgatgtgtacgcggttttatgcacttcttttaaactgtcaaaaggatgtctccgtgtacaatgtgtccgtgagacaggtaacatgggggtaaacagagaaaagagagtgggggtggggacactcctggcttcctcgccagctacaggttttcctccaaatctgagtgctgaggctctggagcggacagagaggaaatgacggctgtgaaccacacgtccggctcagccattttctaggcggaaaaaaggaagcccctttggctctctcctccctttgtccgactcgcgctcccgccctcccggatccgcgccctcaccttgaagccctccaccgcctcctcgagcggcagcacgctgtggccgcggtgctcgcgggagcggtcgcacaccacgcagatgggcatctggtcctcctcgcagtacagcttcaggggctcgcggtgcttctcgcacacgcccatctcgccgccgggccccgacggccgctcggtgcgcagctgctttaccagttgggtcacgttggccaggtgccggttgggccgcatgtgcctctgcgggaaggtctcccggcactgcgggcacgacacgttagtctctgccgtgccccagcagcgggcgaggcacgcgcaacagatgttatggccgcagtcgagcatcatgggctctgcgaagtactgcaggcacacggggcaggtggtctcctgctgcaggcactcggccacactcccggaggccatggcgccggcctgcgggggcgcacgggcatgggccccggcgccgagctctgcactgagcccaactctccggcgctctctccggttcgctgttcctgagaggcaccgggcggacggagggcggcgcctcccgggcccgtatcccagacgcgcccgcgcaccgaaggcttggagtggccgggccgatgcctgcgcctgtgccccctaagcgagagcgggaatacggccggctcaccgaggctcgcggccacgctagtggggcaggaaagggtagccgagggtcagagtcccagggccaggcgggcaaagcgcgcaagacaacgtggccgcgtccgagcggatgccggcggcagcgtaaaccccaccccagcgcgagcggaagaggcggctcgcgggggcggggcttggctcgcgcttccagcgagtgacaaggtttcgtggcctgggggcctgagctgtttcctcttggaaaggccgaggaggctccgccactctcctttggactggtcgcgctgaagctctatcctagggcactggtcgcaagagcagatggtgccacacgctccgggcctacaaacttcagcggctgccgggcccgggcccctcgtcttttgttgggtttcctcttggtgccaggtctcagcccctgcaaaagaaagctggctttggccgcgcgcagtggctcgcgcctgtaatcccagcatttgggaggccaaggcaggtggatcacgaggtcaggagatcaagactatcctggccaacatggtaaaaccccatctctactaccaatagaaaaattggccgggcgtggtggcaggcgcctgtagtctcagctactcaggaggctgaggcagcagaatcccttgaacccaggaggcggaggttgcagtgacccgagatcgccactgcactccagcctgcgggacagagggagactctgtctcaaaaaaaaaaaaaaaaaaaaaaaagaaacgaaaaaatgaaagctggctttgtataggtgctggggagcgcaaacacctggcctccccaagaggctggaggatgaggagggtcaccgactgagcccacctgataagtgaggccttttattaaacagccccatttgtaggcacttgcagttttgtttagaaaaagaaaggtttaattatcagatggtaacatttctgtgtgtcaataacaagcccagttctgctacctctcacttgtgcccaagcaagttggtttaccattcatttacctcagtttctcctcgtgtgaaatggggatgataattgtaccgcagtaagaagtagatttcgttacatcttttactttttgaaccataagattgtttatccattaaaatggtattaaaatgcccactacgtagggttgttgtattgagtagcaactaaaaattgcttgctcctttctgaagtatagagaaactaagaatcctgcggtgacccagggtcttggagtcccacaatactcattgtcttatcatccagtagacctccagcatttttaagttgctttcttatcccttacttggtgtttcctagttttctttgagattttctcaatattgtcttgctatctgagcaaggcgggcttctgcttccagaccatcactttatttttattttttcaaagtgaaagtaagattattaagaaaataaaggaataaagaatggctactccgtaggcaaagcagcccacatcatcactttagagagttccactctggtcctcttccccatgggacaagaagtctgagggattaagtggacttgccagccccaaacccacatctaccttctcaaccatactctgagtacccagtcattcaaattccagtcccaaatagctttagcccatttccagaaaaatgtagagtacttgggccaggccacaccacagtctggtcttggtttgagattgggtcaacaatgaaatttgtaagaattaaaggatatgtctattctcatttactccaaaaaggactaataagcattgcaatacagtgcagaaatatgagagatatggataggtagataaagctgcccttcatcttctcctttacttgggggatgcaagccttgagtttggctttgtttttcagaattgattgtgtttatcttaccaaccctttattacctctggaggcaggtgacctgggggtaaagaaaggtagaacaggcagggtgtggtggctcatgcctgtaatcccatcactttgggaggctgaggcgggtggatcgcttaagcccaggagttcaagaccagcctgaccaacatggtgaaaccccgtctctaccaaaaatacaaaaactcgatgggcacagtggtgcacacctgtaatcccaactactctggagactgaggctggagaatcacttgagcctgggagacagaggttgcagggagccgagatcaggccactgcactccagcctgggcaacagagcaagactccgtttcaaaaaagaaaacaaaaggaaaaaattttaaaaaggtagaacaaaatagatgagttgggtagaacaaggtgggagtgggggaaagggaatatttacattagcaatctctaacagtccccttccttttttttaatttaaaaaagttacacctgtctttttctcaataaattttgtaagaaaaaagaaattttaagagatggggtcttactatgttgcctaggctagtcaagaactcctgggctcacgtgatcgtgaccctcccatctcagccacccaaagtgaggggattacaggcagaagccaccatgcccagcccctcttccttgagtgtttactgtcttcccttcatcatccagatttcatggaattttgatttgcttaatttacctgttcatgttaatttctattactaatcctaacctatattattgcaccagtgtgtcagtttacaagtatttttcaaagaatcggtagccgtgcagccttcccattaatttctctatttgtactttttcactgattcaaataccacctcaaggaatagaatcatccttaaaaattcttaaagaagaaaatgcttttcattctgtcgcttcttactcagacatcttcaaagttttgtgggttttttgttgttgttgtttatttgtttgtgtttgcctctgggacattgtccaaattctttagtataaaggcctaataaaattcttattaataggcccggtagctcacgcctgtaatcccagcacttccggaggctgaggtgggcggatcccgaggtcaggagatcatgaccagcctggccaacacagtgaaaccccgtctctactaaaaatacaaaaattagccgggcatggtggcgcacacctgtagtcccagctactcaggaggctgaggcaggagaatcgcttgaacctgggaggcggaggttgcggtgagccgagatcgcgccactgcactccagcctgggcgacagagcgagactccgtctcaaaaaaagagtattaataaaatatactttttttttttttgagacagagtctcgctctgtcgcccaggctggagtgcagtggcgcgatctcggctcaccgcaagctccgcctcccaggttcacgccattctcctgcctcagcctcctgagtagctgggactacaggcacccgccaccatgcccggctaattttttgtattttttttagtagagacagggtttcaccgtgttagccaggatggtctcaattccctgacatcgtgatccgccctcctcgggctcccaaagtgctgggattacaggcgtgagccaccgcgcccggcctaaaatatactgttttagggacaggcacagtggctcacgcctataaacccactctgggaggctgaggcgggcggatgacctgaggtcaggagtttgagactagcctggccaacatgggaagccccgtccctactaaaaatacaaaaattatccacgcatggtgtcgcatgcctataacctcagctactcgggaggctgaggcaggagaatcgcttgaacctgggaggcagaggttgcagtgagccaagattgcgctattgcactccagcctgggcgacaggagcgagactctgtctcaaaaaataaataaaataaaatataccgttttaaaatgaatttcctcctgcctcctctaaacctccctgccctaagggaacgagtgacttttactagtattggccaaatccaagggacacttttcagtcttcatcttaacatctcgaaggcattttatgtggagtcctaatcagggaaaaggagtcaggctggtgggaccaggggaaagcaaagataaagcaaacaagtgataggtctgctttttttatggcccagggcacatggccctcctgtacataactcacaaacttcctgcttaccatcaaacgcctcgatttatcaagcaccttggctgacagaagaatgcgggttaagcttcctgctaccttagcgttatcaatcagtccaagttccattgtataaaatccctagcaagtctttgtttctttgtagtcagcttctcttctgttgatactgcctgttgtctccctggcaacatatttttctactttctctaataaatctgcctttctttacctacaatggtcttggtaaatcttttccccctacaccacaggcccagttagtcgtcacttacctgtgacattttacactgttgatccctccctccttggatcattcttcttccaagcagcaaactgagtgggacctgatgaggcctaaagtatttctgcttcttctatctccttctctcttatctgtcttttaccaactgatactaaccttagtctggaaaaataaaaaattatcataataaatacaagaatacagtacttaagaagccaacgtattagatgagacagaatgggaaatggagaaaaagacaaaatatcaataagaatttaacattaatataaggtccgggcgcggtggcttatgcagggtaatcccagcacttcgggaggccacggcttgagtttaggagtttgagaccagcctgggcaacatggtgaaacccagtctttaccaaaaatacaaaaaattagctgggtgttgcggcgtgcacctgtggtcccagctactggggaggctaaggtgggaggatcccttgatcccaggaggcagaggttgcagtgagccgagattgcaccactgcactccagcctgggtgacagagccagaccccatttccaaaaaaaaaaaaaaaaaaaaaaaaaagaatttagtacaagatacaggagaaattgcaggttggtgctatacattcaataaatgattgtggaataactggctagctacttgggagaaaaaagatctcatctcacttcttatactgaactatattattgatcaatgaaatttttttaagaaaattaatccataaaaattccaggaaaaagaaaactgattgattttttttaaggcacttgtcatctggaagatctttctaaacatgaccccacagaagtcacaaatggataaatttggttatacagaattcaaaattagatgtcttcttataaaaaaattttctaaacagctgaatgataaaggaaaattggggaaagatgtttttagcaaattaaacaaaggatgaatttccttgagacaaaatatttgcacaaataaaagcaaaaaaagagagaagaaaaatgagcaaaggtcatgaacagatggtacagagaaaaagaacaaatggtcaataaacatgtgaaaagaggtgatgttaattttaatttatgagattagcaaagatttaaaactttgacagtattcagtattaatgagaatgtgaggaattccagtacactgtgagaatgtaaattgggagaacaccattgaaagcaatttgacaattgggctgggcgcggtggctcacgcctgtaatcccaacacttttgggagctgaggcgggtggctcacctgaggtcaggagttcgaggccagcctgaccaacacggagaaactctgtctctattaaaaatacaaaattagctgggcgtgttggcgcatgcctgtaatcccagctactcaggaggctgaggcaggagaatagcttgaacccgggaggcagatgttgcggtgagccgaggtcacgccattgcactccatcctgggtgacaagagcaaaactccatctcgattaaaaaaaaaaaaaagtaaaagaaaacaatttgacaatcactaaaaaaatttaaatgcactcactcgtagaaccttctactctgcttctctcccatctggacagagatgtttgattatacaaggattgccattacagcattgtttggatttgtaaaatactgggaccaacgtcaatatgctccaacaggggataagttaatgaaaatattatgcaggtgtacaatgaaatgctatgcagtttccaaaaacaaaaacaaagaagaaggaggaggaggaagaagaagaggaagaggaggaggaggaggaggaagaagaagaagaagaaggaggaagaagaagaagaagaagaggaagaagaaggagaagaagaaaaagaagaaataatctaatagggaaaggtgtctgagatttatttactcattaatttattcaacaaatgtttgttgagtgtcaactatgtgccagtcttctagattccaggacactgtgtggaacaaaacagacaaggttgctggggtcatggaattactttctagagggaaagttggatgataagcaaaccaagcaataaacacatggtatgaaacatgccataaagtggaatgaatcagaatatggaagatgaagagtgatggttattactttatattgggtcatcagggtggaatctctctgatgaggtagccaaacagctgctgcagtttagagtctcaaatttgcatgtcactgggcatttatctcagagaaataaaaatgtttgttcacccaagaatctgcacaaaacattgttcgtaatagccaagcctagaaataattcaaatgtcctcgaatggtgaagagttaaacagtggcacatccatattatgaaatactacccagagataaaaatgaatgaactactgagataggcagcaacttggatagatctcaaggaaattatgctgagtgagaaaagtcaatctcaggttgtgatttgtatgattccattaataacatttatttatttatttatttatttatttatttatttatttatttttgggaaagagtcccactgtgttactcaggctggagtgcagtgggacaatctcggctcactgcagcctctgccttccgggttcaagtgattctcctgtgtcagcctccggagtagctaggattaaggcatgtaccaccatgcccagctatttttttttttttgtatttttagtaaacacgggttttcaccatattggccaggctagtctccaactcttgacctcaaatgatccacctacctcgacttcccaaagtgctggaattacaggagtgagccgctgtggccagcccacaacattctcgaaatgataaaattatagagatagagagcagatgagtagttgctaggcattagggagagagaagggaaggaggtgtctgtggctataaaagggtaccctgagggatccttgtgatggaacagttttgtatcttgactgtaatgttgttcctatgtgatatttacacatgcaataaaattgtatagaactaaacacacacaaacagatgagtgtatgtaaaaatggtgaaatctgagtaagattggtggattttatcaaaaataatttcctggtgtgatattgtactatatttatgcaagatgttaccattgggagaaactgagtgaagggtatgctggatctttatttttattttattttattcttttggagacagagtcttgctctgtcgcccaggctggagtgcagtggcatgatcttggctcactgtaacctccgcctcctgggttcaagcaattctcatgcctcagcctcccaagtagctgggattacaggcatgtgccaccatggctaggtaatttttgtatttttagtagagacagggttttgccatgttggtcaggctgatcttgaactcctggcctcaagcaatcttccctcctctgcctcccaaagtgcaaggcttataggagcgagccactgcacccagccactgaatcttaattacatcctataactgtatgtgaatctacaattatgtcaaaataaattttaaaaaatttctgcagtcacagcatcaatgacttgtctttcccagccagcaaagccctgtgttttgctcttattgattggactaatccctgtggacagagaaattcatgtgccagttggcttaggtttggttttactacctattcctgaaccaattactatggcaaggggactgagataatgctcactggtctatgcatcaagacccactgaaaaatgtaattgtcattagtcatctaaatataatttatttttgaattggttatgtgcttcccaacatttagctatattctatttcctggggataaaatctttgaagacagtgggaggaaaagctaatctgaccccttctttcaaacagcaaggggttgaggatttccttgattttaacacaggcattttgaatatgagcagaccatgcctggtaaacacactagacaagattcctgcccttatggagctgacaggccactgggggctggatggaggccgagatggtagctgtctccaagatagtcactatcttagagacctctcatatgcacatgacattggatcaccaagatatgtaagctgggcatcatggcacatgcctgtagttccagctacttgggaggctaaggtgggaggattgcctgagcccaggagtttgaggctgcagtgagctatgatcatgccactgcactccaacctgggcgacagagtgagatcctcatcttaaaaaaaaaaaaggccgggtgcggtggctcgcacctgtaatcccagcactttgggaagccaaagcaggcagatcacctgaggtcaggagttcaaaactagcctaagcaacatggagaaaccctgtctctactaaaaatacaaaattagctgggcatggtggcgcatgcctgtaatcccagttacttgggaggctgaggcaggagaatcacttgaacctgggaggtagaggttgcagtgagccaagatcacaccattgcactccagcctgggcaacaagagtgaaactctgtctcaaaaaacaaacaaacaaacaacaacaacaacagaaaacagggtgcagcccactcctccagccccttgaatctggtgggctggcctatgagtactgtgactaacactgtatggcagaagtgattctataccagtgccaggccagggctgtaagagggctgacagcccctgtcttgtgtctctgagtcctgagacaccatagatatgtctttattagtctcctcaggctggcatacaaaatactagatggcttaaaaaacgggaatttatttgctcacattttattttctggatactggaagtccaagatcaaagtctgcagggttggtttctcctgaggtctctctccttggctcgcaggcagccgccttctgactatgtcctcacatgaccttttctctgtgtgcatgcacctctgatgtctcttcttcttcttataaggacaccagtattatcagcttagggcctcactcttatgacatcatttatccttaattgtcatccctataaagatcctatctccaggcagtcgcggtggctcacgcctgtaattccagcaatttgggaggccgaggcaggtgtatcacttggggctgggagttcaagaccagcctggccaatatggcaaaagcctgtctctactaaaaatacaaaaatcagctgggcatggtggtgcacacctgtaatcccagctactcaggaggctgagacaggagaatcacttgaactcaggaggcagaggttgcagtgagccaagattgaggcactgcactccagcctgggcagcagagcaaaactctatcaaaaaaaaaaaattatcttcaaatatagtcacattgggggttaaaattccaaaacatgagttgggagctgtgtgtatgtggtgggcagagtggacacaactcagtccatagtgatgtccacctactctactacgggactccataaggggggagtgagctcattgaggccatccttccagccattccctgagaaaagcatgaggattttcagtgaagagcagcccaactaccaaatggatacattctgagttgccagttaatgccaggtgttacagaaaaatcatcccagtgagccctacctgttggggcagtttgttatgcagtatgaaataatcagaataaggagttgcattcagttattaatcaaatcaatatgtggttactaattgtgacaacttctatgatggaagagacaggatgctatgagaaagaataacacagtgggtgggaatggcatcacaaactgcaagggagaaataattgaaggacctagagatgttgggcctgaagaagatttcaatgcttttgtgagctctggaaccatttctcttccctttctgggctaaactccttgaataagcggatccctccgctttccttgcaggtgaccactccctccagatcagcctctcataaaacttttctcgtcttcccaggtcacaacaatttttccctttttaacattgtattaggctgtgccggcactgctgtaaagaaatacctgagggccgggtgcagtggctcacacctgtaatcccagtactttgggaggctgaggcttgcggatcacttgaggtcaggagtttgagaccagcctggccaacatagtgaaacgctgtctctactaaaaatataaaaaaattagctgtgtgtggtggcgtgtgcctgtaatcctagctacttgggaagctgaggcaggagaatcgcttgaacctgggaggtggaagttgccgtgagccaagattgtgtcactgtactccagccttggcaacacggagagagactccatctcaaaacaaaacaaaacaaaaaaagagaaatacctgagactgggtaatttataagaaaagagttttaattggctcatgattctgcaggctgtacaggaagcacagtggcagctgcttctgcagaggccttgggaaacttccgggttttttgttttgttttgttttttttcagacggagtttctctcttgttgcccaggctggagtgcaatagtgctgtcttggctcactgcaagctccgcctcccgggttcaagcagttctcctgtctcagcctccaagtagctgggattacaggcgtgcaccaccgcgcttgtccaattttgtatatttttagtagagactggtttcaccatgttgatcaggctggtcttgaactcctgacctcaagtgatccacctgcctcggcctcccaaagtgctgggattacaggtgtgagccactgcacctggcctaggaaacttcgaatcatggcggaaaacaaagggggagcaggcatatcgcctagcgagaatggagcaaggaggccccaccggaccccacctccaatattggggattacatctcaatgtgagacaaatatccaatttgagtggggacaaatatccaaactatatcaaacatttttagagtttatgctgtagagcatttaattgacattaaatgataaactgtttcatattgttaatttattgaggtaaaatatacataaagggaacaagccttcagtgtataagctaatgaattgttacatgtgtgtacccaccatccagatcaagaggaaaaatattttcagcatccaggaaggctgtctcatgtctctttccatcagtatccactcccagaggttacttagaaaaaatcactattccaaatttctagaagcattgattaattctgcctgttcttgaacttcatatgaagagactcctatcatgagcacttattggggttttaaattgttgtctgttatgaataaagctgccctaaacgttctggtggtatatgtctgttcatggacaaatgccctcatttctaggagtggaattgctagtaggcatatgtttagttttttagataatgccaaaaaatgttccatagtgaatgtgctaattaacacttctagcagcaatgcatgagaattctagttgccgcacatattacaccaacacttggtacagcatatgtgttttaaaatattttagctgttcaggtggatttgtagtggtatctcattgtggttttaatttatatttccctgctaattaatgatactgagcacattttcaaattttcttttgctggagtgcagttatgcaatcatgacccactgcagcctcaacttcccaggctcacaggatcctcctacctcagcctcctgaatagctcagactacaggcacacgccaccatgcctggctaattttttttttttttttttgtagagatggtggggcagggggagtcttactatgttgcccaggctggtctcgaactcctgggctcaagtaatcctcccacctcctgaagtgctggtggcattacagcgtgagccactgtccctggcctcatatgtgtactatttgaatgtagtctttagggaagttcctgatcaagtcttttgtcattaaaaaaaaattatttgtctttttcttgttgatttacaagagtgctttatatatttaggatgagtcctttctcaggtatgtattttgcaaatgtttcctgcaatttgtggcttccatttttcattttctttttcttttttttttttcgggagacagagtctcactctgttgccaggctggagggcagtggcacaatctcgactcactgcaacctccgcctcccgggttcaagtgatcctcctgcctcaggctcctgagtagctgggactacaggtgtgcgccaccacgctcagctaatttttgtatttttagtagagacagggtttcactgtgttggccaggatggtcttgatctcttgaccttgtgatctgcctcagcctcccaaagtgctgggattacaggcgtgagccaccacgcccggcctccatttttcattttcttaatgatgttttttgatgaatagaagtttccagttttgatgaattttatttcatcgactttattgatttatttttaaaatttttacacttatttatttatttaatagacatgggttctcactgtgttgcccaggctagagtgcagtgactgttcacaggggctatcattgtgcactacgacctcaatttcctgggctcaagcgatcctcccacctcaagcctcctgagtagctggaactacaggtgggtgcctgtttaactttttttttttttcattttggttactctttcctgtttttgaaatctttgcgtaccttacattcattaacatatcctctttctagaagctttactttccctgtcatacttaggtgtatggtccattatgaattcatttttgtgtttggtgtgaggcaaaggtctagatttagtttttttcctaattggtccagcaccttttattgaaaagttatatcataaatttgtaaatgcatttctgtctattcacctcgttttaaccactatctccaaaaagcagaaaatagctgcactaatggaaaaccagttcaccagatttacttattctgttttttttttagacggagtctccctctgccgtccaggctggagtgcaatggcatgatctcggcttactgcaacctcctgcctcagcctcctgagtagctgggactacaggtgtgcaccaccatgtctggctattttttttttttttaagacagtgtctggctctgtcgcccaggctggagtgcaatggcgtgatctcggctcattgcaacctccacctccccggtccaagcaatactctttcctcagcctcctgagtagctgggactacgggcagccaccaccacgccaccacgaccagctgatttttatatttttaatagagacggggtttgaccatgttggccaggatggtctcgctctcttgccctcgtgatccccgcaccttggcctcccaaagtgctgggattacaggcatgagccaccgcacgcggcctattttttgtatttttagtagagatggagtttcaccatgttggccagggtggtcttaaactcctgacctcaagtgatccgcccacctcagcctcccaaagtgctgggattacaagtgtgagccaccacacaaggcctacttgttctttttaactaattataacatttacagcaactcatatgttgaagcggttttaacagctttaaaaggtttctgtgggattatcattgacctgtttttactttgtcttagtgatagctttgtaggaaagattaatttttccttagcccagcagagagaggtgagactgatggacataaaaagaaaatactcaagaaaatatattaatcaatagtgtattttattattagaatacatccataagaatcctttatatttatgcctacactcttcatgaatctcttcttgtggacatatttatttacttatacatttcttaattcaacatatatttattgaatacatttttgaatatggcaatatacattcatatttgttattattattattattacgagatggagtttcactctgttgcccaggctggagtgcagtggcgccatctcagctcactgcaacctctgcctcacaggttcaagggattctcgcgcctcagcttgggaatacaggggtccgccaccacgcccatctatttttttgtatttttaatagagacagggtttcaccatgttggccagggtggtcttgaactcctgacctcaggcaatccgcctgcctcggcgtcccaaagtgctgggattataggcatgagccaccgtgcccagcctcatatgtataatttttagttaaattaataaattaatatttatggttttcatcattatgactttgtaatatttttcacagctgagctccatggtataccataattaccttctttgacaaccttttgttcttcctgggattaataattgcctcctgttctttgcttacttttctaaatatttattcctaattcaaaaccagctttctgacactattttctcgtcaaatgcatgaggcagtatgtcagttccattttcccccattggaaacaaccctcgtttagccctcttttttctattccaccgtagactgattgccttctagcctggtagctcagcagttgccccggagttttttcctttacctttcttctgtgttaggtccccagtcaccggatttcatatttcctttttcttagtttaattccctagttagtggacaattctccagaagctttctgagaaaaggtacttgggagataatgttctgcaaatgtccattcacatttgattgatagtttggctgggttcagaaatctagttgtggaaactattttcctttattgaaatgatttagaaggcattgcctcattgtctttcagcttttggtgttggtgctgctgtggagaaaaaaagatgacattctaattcataatcctttctgtgcaatcttttagttttgttttccttctggaaacatttaggatattcactttattcatctgatatttcacaatgacaagctttattgtggggctttgccacaccctatgcagggtagttggtgggccttttaaatctggagacttaaggtctttggttctgaaaaataatcttatattacatctttatctcctttattccactttctcctcttttcctagaatccctgttagtttgttggcatatcttctattatacaccattttattttcttatcaattctttgctattttccatcattcaccccaaactttccagatttctacaaccttattttgaaattttaggccaggcgcagtggctcacaactgtaatcccagcactttgggaggctgaggcgggcggatcacctgaggttgggagttcgagaccagtcagaccaacatggagaaaccctgtcttaactaaaaacataaaattagccgggcgtggtggcgcatgcctgtaatcccagctactctggaggcagaagaatctcttgaacctggaaggcagaggttgtggtgagccgagattgcatcattgcactccagcctgggcaacaagcgccaaaccccgtctcaagaaaaaaaaaaaagaaatttttaaaaatccagccatcataatattattaataattttaagaactcccctcctttttgtttcatgagtgcagtatcttctcttactttcccgaggattaattataatttttaaaaaatccaacttcctgcattgtatttgtttcctcttaggttcttcctgcccccttctgtttgtattcgtccttgtcttattgtagaaatattttcacaaccacctgattatccttggttgtcgtacatattttaagtaaggcactaaacacctgattctggaagctctgtggacctgctccaagcctgtagactgcagagtctttggggattctatggagacccagccatttctttgggagatcctcaaataccagtgtttgtcgttgttttaatttttattttttccttgtaaattgacttggatatctcatctgtctttctttatctctggaaaactttatcccagtttcccttgacatactccttcaacctcctgggagaggtagggggaggggagatgagcctgtttgactagttctgggaatgtggtgagggaagagatctggggatttcggctcagtgctgacacttccttcatgctactctggtttagcacccctgcacttcaccctctttcaactcctgaccaagtcaactcctgttactcacatcgacagtcatttttcatgttcaagacccctgaaccgctctcatcccccactctccgctaactctcctgcttcgcttcaggtctacattgcctcgctcatttcttccctgctgagctctttgattagtttgctaagcagcatctcgggaacagcccccgtgctatgtgttctttcttgtcatggatatgtgttttttcttgtcatgctatgtgttctttcttgttcaaggcagagtcgcggctgggttgttaggatgctcgcgcccctgtacccggggcgtgcagggaagtgtaagaagggggcgaagggcgagaaacgctgaattctagcctgaattggtaggagagcctcgcaagctgagtcacggttcctgattccatttaaatagaacgttttgttcacttgtaggaatttccttttccatttctttcattaaatcgcgaacgtagtaatgacttaacgctggttacgcattcattacaatcgaagattatattaatttgcgatggtaagtgtcccaggtgtcaggatggccgagtggtctaaggcgccagactcaagcttggcttcctcgtgttgaggattctggtctccaatggaggcgtgggttcgaatcccacttctgacacaactatcttattctccttttactctactttctcagccatttctgtgttttcattctttctacctcaactttttttattctaactaaaatgatacactctcaatgaggtctgcccccttgcttttcagtcttgttcgctgtttagtagtgaatcacgttttgccccgctttggtcagttcgttaaaaggcgcattcatttaccacatgagcactcacccagaggcgtactgggaggaaactagactaggtaggaatagaaagacatgtatacagactccatcattacatactggccctgagctcataggttattgggaccgcagattacatgtttttcctcacggccagaaaccatcaaaaataaaagtgatgaaactgaaattgaaagcagcaaggttcacgctcaaggttatcggaaacaaggcaaaaggagagaaatgaaaggttccaccgagatttgaactcggatcgctggattcagagtccagagtgctaaccattacaccatggaaccctacttaacaaaaaatggatactcgatccacctggggtctctcttgtcttctacttactaattgatttaaagtaattttgcaggggcagtttttttgttttggatggccaaacgcagggatgggaggggtagggctcacacactgtttccaccgcgcctttctcccagatttctttccatccttcggggcagggcagtatactgatctgggaatatggttattcctggagatttttattttctttcgtttccagcccacgaaaaggtgaattgaattttagtctcacggtttgaaagggagaaaagagagaaaagaaaaaatatactatctactttctacagtcttatttattcattgtacgatacctacagatgcctctagaacaacctccgagtatcttggcactgcccctcagttgtaaccatgggcttaaatttttaaaatctgtctcccgcattcctccaaaatgccttaagtgcagggctgagtctcagtagtctttgatagcccacggtctgctactttgtagaagctcaaccaatgcttgttgcatgaatgcataaatgaaaggatgagtgaatgaatgaatgaatgaatgaatgaatactcagtgggacagcccagcttagacttttgggagactttagacttcttttttgccttcacttgctaggctaaattttacaagttcaaaagggaataattatttctcctcctcctcctatcttcttttgcctttccaggtcccagctcccaggtggacatcttagcgtccagatgacccaacatataggtgtcctttagtatggatgaccaaactaggatgttatagtgctggatgtagtaattcattttttcaaatcttaactttattaagataacatggttatttatctagtaattgtgagaacaacatataacaaatagaccacatatatacgtagcgtgtctggaagaaatactcagatataaattactactttagtcaatcttaatattaattatttgtcaactatgcttaatgtgcctctctagtctctcaagactaaattgctaaggaaccctggaatcatttgctggcattcatcctttcaagcaaggtgcctgttacaaaatatctgctcaattagtatgtattggatacatcttttggaaggtgaggaaggaagcagtgaaattagaagacttctgcctaggcgactgtaaagtgctcctaagcatctacccacctccctgcacacaaaaactctccattctatctcctcgagtctcctagccttaaaagatggtctaaactaccccagatccaggtaaataacggatcaagtccttcttccctaaaacaggtgttattctttctattctatgagcctccaccttatttcttaaaaaaaaaaaagaaaaaaatgtttactgtttaagaagataacagaatctcaaaagctaactcttcaactgtgttcaactaaggaccttaaactgctctctgaggataggtgaagcgggaaaggctctaggtgtctggtgactgtttcttttgttggttcgtttgttttttcagccttagcacatttatcccttggagaagacaatggaaaatagggcagatgagcgtgcgtggcttatttattcttgagtctggagttaagaaggttgtactttttccttaggattgcccttggttggttcacaaatttcgcaaagtgaatgaaaacacatgaaggccactgaagggaataactaggggacgagatgtctgagcccctaaatcgagaaacatttgggcaccgtttgtgggactgtacatatgggtgttatctgtggcccctaggaaaacagaagaggaacctgtctcacttaggaagctgtgagaactgcccacacaaggcttgaaaatggaactttactgggtcagaatgacgagggggaaaaaaaaaatacctcacactggcagcggtgggattcgaacccacgcccccgaagagactggagccttaatccagcgccttagaccgctcggccacgctaccacccacagggtgcgtcgccgctttcagtttcacccaagtgactgtcgcccctttccagtcctttcattcccattcccacatcaccataagcccttccctcaggccccttcttcagcattccttgcttctcagcatagcccgagaacccccgatccctgacactttgcttcttctcagctcccagatggatcctggacaggatgctgcaggtggtgcaggaggggaatcctgccccatttatcatcaacacagtaaaaaggggtcgaagagaccgagagcgccagaggacgccatgggctccacatccacttggattccagggagtaagcctctcgacttcaggagtaagcaaggccaaccgtttggtttgagcctgttgcttctaagaaaagcgaggaaaaatcctgagacctcctcccctcgcccttcatccacttcaggggaccgagtgtctccacggaacttcacaagggaggaaaagagtgaactcattattatttgtcttgtcttcgtttcagaggcggtacatctacgaaagccctaatcatagagggaaagactcctcgttcctggcccagaaatgagatgagaaatccagggccccgtacaggaaggcctttcgcaaagtccagactcaattgccttcgcagcccttaaagtttccttaggaaggtctgtgggagaacgaggttggtttaggaattggcccctgccttgtactacgtagttttgtcatccaaagtgttttagaagtgaattgaatcatagttacgccttattttgaaacactgtaattcagagaacgtaaaaccttattaaaatgcctcataatcatcttggtagagccgttggttaagcgggagagacagttgcctccttagcgcagtaggcagcgcgtcagtctcataatctgaaggtcctgagttcgaacctcagagggggcaaggcgtctgttttgccattttacttcttcttgatccaaaatgagtaagacaacaaaggaagttgacaaaacgttgttctttctctgctttctctatagaaaagtgtacaatatgtctggtaagggaaaaaaaaatctaaggacattgctttgatggaacagaacgggtaattgctgtttaatagaaccatgttcagttacaaaacagtgattttcactaagaattaaattctccaaaattctcatctcccctcccgccctgcataccaattggagatagagctggtagcattttcaaatgtttttcagatatgcttggcaattgtctttgttttaacaacaccagagtcaagaaacttgccagttttagagtgctgagataagaaaaagtgggtggagggttgtactaggggtgtggaaggtatagaatctaattatcaattactgacttggttatcttttaccattcttctggaatggcttaccaccaggttgccaccaataacattccatatgaaaaaagaaaggaaacaaaaaactgacaaaaaactcccccctcagtctcattgcattggaccttttctcttgcttccagtcctgttgactggatctaaatcatccaaactaccagatgcaggaaggggtaaaaagagaaacaagaagtgaagaagataggctgatatttacagtcaagatgagcccctgactcaaataataatgagcaagactgatcattaatgtcctgctcttgagtcctactttgttccaagctgtgttcctattaatccattccctctcagctttaaaatcacccttatatactttgttttgtgacattggggctgggcgcctgcaaatgatatttcccaaactcctttgcccattggcttcctcttgtgttctgtcaataagaggaaccagaaagagactagaaagcaagaggagagaagcaggggctgctttctaaattttgttcttcctgtcaggtcactccaacaatggcagttgaatcccatctctatttgttctcttcatgcattccagaatgtctcactgtccattacataagtaagtagtagtccagctgcagcgcgtcctctttagcactccaggatgcctttcctcagtggtctcaacctcttcctttttgttcttccagccctacaaggtggtagctacttcccagtagttatcacctctgagttaccatggtgtgcccagttgaaatacctagtcttattcctttttttttgagacagagtcttgttctgtcacccaggctggagtgcagtggcacaatctcagctcgctgcaacctctgcctcccgggttcaagcgattctcctgcttcagcgtcccaggtagctggaattacaggcgcccgccacgacgtccagctaatttttgtatttttaccagagacggggtttcaccatgttggccaggctggtcttgaactcctgacctcaagtgatctgcccgcttcggcctcccaaagcgctgggattacagatgtgagccaccgtgcccagccttatttcttaactagaccctgaaccacacatagggggtgcagggatagcactccacacaacagaaaaagcttctgctctcatggagtttacattttagtggggaatgataaagaataaattcaaccagatatataaaatgtgaagtagtgatacatgccatgaaggaaaagagcaagagaatggagaacaaaggggaggggattgctttataataaagggtgaccaaggaggccttcctgataaggaggcatctgaacagagacttgaaggaagtgagtgagtgagctgtgaggctatcagggagaagagaatttcaggccaagggaacagtaattacaaaaggcttggcaggaatgccattggcatgttcaaggaacgaaggaggagactagtgcagctgtaggtcagtaaacaagggagaacttgataggagatgagggggttagatacacatagaccctacaggatgcacatagatcatgcagggtctcagaggtcatgatcatgttcagagagggaattcgctgcataggggagagaaaagacaacagtgatttaagttgtggaggtcagccagaccttgagaatattctgattcatgagtctgagatagaatctgtgaatcttttttttttttttgagatggagtttcactcttgttgcccaggctagagtgcaatggcacgatctcggctcacggcaacctctacctcctggttcaagcgattctcctgcctcagcctctggagtagctgggattacaggcatgcgccaccacgcccggctaattttgtgtttttagtagagatgtggtttctccatgttggtcaggctggtctcgatctcctggcctcagatgatccatgcacctgggtctcccaaagtgctgggattacaggtgtgagccactgcaactggcctgaatctgagtttttaacagtgactccaggagatttgaatgccatcagtgtggcaacattttggaagccccagtcaaggacttactcggcctatattcatttatcctatgttgaccgtctctggagagatcatttcctcccaaaattctcctcatttttgtttagtcatccagggcttgcttactggttaaaactaggagcacttgcctcatcaagagcagaataaatgttctatgcttcccagagaactctcaaaagctacaaggtgccatttcctattctgctttatttctaatttttcttttttctttctttctttttttttttttttgagatggagtcttgctctgtcacccaggctggagtgtagtggtgtgatctcggctcactgcaacctctgcctcccaggttcaagtgattattttgcctcagacccttgaggtagctgggactacagtcatgcaccaccacacctggctcatttttgtgtttttagtagagatgcggtttcatcatgtttgccaggctggtctggaactcccgaccacaattgatttgcccacctctgcctcccaaaatgttgggattacaggtgggagccactggcctcgccctgttttgctttatttctgcctttccctgtaaagagcttttcttggtaaataagcagctgagacatcttgacacctcctgccctccaggttcccaggggcagtctgggcccaagttttctttcttctagctgttccccagtttctctgcatcattcctccccactgccatgtctcgatggccttcttctgcacaatggcctaatttatgtttttgcatcacctcttcctccattctgactcattctttacataaagccagtgtactcttaaaagtaatctcatcatgtcatttcttcctgcttagaattcccagtggcttcacattgctgctagggtgcagtcagctctctgcactactagccataacctctgagcctgtgagtcactggtctgtccctgccttcctgtccacctcagaccccaccttcatgaacactctcttgagctctctgtacacaagctgctcaggccttctctcaggtgtctggaagtgttctgctctttaatctccctggaatgctggaatcacatttttgtccaactaggcctttagttttcagtttaaacatcacttcctgggagaagtcttctctaatcccctggaagaggtcatctccctttataatccatgctcttgaagatagagggcagggtgtgatttacagtgtgcgatttacagtgtgcattattttgtctcaccttacttttctctatgttccctttatcttgatttaaattaacatttttcactttatcttacagtatagttgtgtaaataacctcgaatctgtttttcaatagtagcataaataaatgcacgatcagaaatgtaccacatgacaaccattgtgctagacctagcctttgagggatttctgctgtgagattaaagtggtcaagagattaacaaacttgtctaaagtggcacaagcaaaatggttaaaatacagtgttctaaatgatccactttacaataagaataattgtgataacacctaattttcatggaaatgtcaccaagcgtttgcttacattatctcgtttaatttgcaaagtaaggtcatgagattttgcttgtttttcctcaacattttgtaacctgaacgttttctcaagagcatgtgttacagtgactgtttaaacagtgtaatttgtcgtttaacggctgcttttcacttgtaaaatatgaacgccccaagggctgaggtagtgtgtcccgaattggtgggttcttgatctcactgacttcaagaatgaagccacgggccctcgcggtgagtgttacagctcttaacgtgacgtgtctggagtttgttccttctgatgttcccatgtgttaggagtattcttctttctggtgggttcgtggtctcgctaactcaggagtgaaactgcaaaccttcggagagagtattacagctcttaagacagcacgtctggaattgttcgctcttcctgctgggcttgcgctttcgctgacttcaggaaaaaagctgcagaccttcacggtgagtcttacagctcataaaagcaatgtggacccaaacagtaaccagtcgcaaaatttattgcaaagagcaaaaaaaaaaacaacactctacaatatggaagaagagccgagcgggttgtggatgctggctccggcagcctgcttttattctcttagctggccccacccacatcctgctgattggtagagccgagtggcctgttttgacagggtgctgattggtgcatttacaatccctgagctagatacaaaggttctccacgtccccaccagattagttagatacagagttttgacacacaggttctccacggccccaccagagccgctagatacagtgtcgattggtgcactcacaaaccctgagctagacacagggtgctgattggtgtgtttacaaaccttgggctagatacagagtgccgatatgtgtatttacaatccctgagctagacataaagattctccacgtccccaccagactcaggatcccagctggcttcacccagtggatcccgcaccggggttgcaggtggagttgcctgccaaccccacgccatgcgctcgcactcctcatcccttgggtggtcgatgggactgggtgccgtggagcagggggcggcgctcgtcggggaggctcgggctgcacaggaacccacggaggcgggggaaggctcaggcatggcaggctgcagtcccgaagcctgccccgcgggaaggcaactaaggcccggcgagaaatcgagcgcagcgccggtgggctggcacctctgggggatccagtacaccctctgcagtcgctggcccgggtgctaagtcccttattgcccggggccggcagggcctgccggctgctccgagtgcgaggcccgccaagcccacgcccacccggaactccagctggcccgcaagcgccgcatgcagccccggttcccgctcgcgcctctctctccacacctccctgcaagctgagggagtgggctccggccttggccagcccagaaaggggctcccacagtgcagtggtgggctgaagggctcctcaagtgccgccaaagtaggagcccaggcagaggaggcgcccagagcaagcgagggctgtgaggactgccagcacgctgtcacctctcagtagtacttctccactgcaggaaacccggggcaaagctgagagccttgctcaaaataagttctcaaaacctattttttttttttctggagtctcactctgtcaccaggttgaagtgcagaggcaagatctcggctccctgcaaccttcgcctcccgggttgaagcgattcccttgcctcagcctcccgagtagctgggactacaggcgtgcgccaccacgcccggctaatttttttgtattttagtagagacgaggtttcaccatgttggccaggatggtctagatttcctgaccttgtgatcgcccgcctcggcctcccaaagtgctgagattacaggcgtgagccaccgcgcccgtgtgccaggtgttcttaaggtcgcagggaagactggagcataacctttgaagactaaagacaagacaaacccggcgattacgtctgtagttatacattgcttttacaagtaattgtttggagtacattacacaaagatgggagttaattttttccatgagttggggacaaaaataactgtgagccatattcaaagtgggcaaaagcatagatgggaataaagaaaaggaacatggataggatttaagttggacgatatcaagtttctgcacctttttactcactagaatgtgcaggaagaaggcttttgcagggagcccggatagctcagtcggtagagcatcagacttttaatctgagggtccagggttcaagtccctgttcgggcgggagtggtggcttttagtacctgattctggtatcatgtttgaaaaagccaaaaaggatactatcgttttatagggacagatttcatatactgcaaaaattcaccaaaccctgtagaaccccaaattttaaaccacgaataggcgagtaactctgatgccaaataaaagtagtaaggtgaatacatgggccctctacagtgagatagccccagattttctgaagaaaactaacatttaaggacaaccttagaatacgaagtatttaatattttatgattcctgttactctgcttacaggtgccaaagtaatcttctgttgttacttgctttccagtgcagagtttattttacgtaggagggaatatactgatcaattatcaagaaagttataatatgttcatattctggcttggcatatttctggcatttagttaccgtgagtcagccctgcaagtcttaaaaactctaggtgaatttaaaaatagtttccggccgagcgctgtggctcacgcctgtaatcccagcactttgggaggccgaggcgggcggatctcgagaccatcctggccaacacggtgaaaccccgtctctactaaaaatacaaaaataattagctgggcgtggtggcgggcgcatgtagtcccagctactcgggaggctgaggctggagaagggcgtgaacccgggaggtagagcttgcagtgagccgagattgcgccactgcactccagcctgggcgacagagcgactccgtcacaaaaaataaaaataaaaatacataaaaataatttctgacggggcgcggtggctcacgcctgtaatcccagcactctgggagtccgaggcgggcagatcacctgcggtcaggagttcgagaccagccgggccaacatgctgaaacagtctctactaaaaatacaaaaattagccgagagtggtggtacgcgcctataatcccagctacttgggaggctgaggcaggagaatagcttgaaccagggaggcagaggttgcagcgagccgagatcgcacggctccactccatcctggtagacagagggagactcaaaataaataatacaaataagtaaataaaataaaaatagtgtctgattctgcaaaggagaggaacagactctgaattgtgatggctccaataaggataaagcagtctctggagagctgcctgaacagccagacaacccagctcttaggcttctcccaaatctttaacagcatttccttaactgtggtagatgcaggctcctggaaccagaggcctagggtccagacgaaattgttaagatgttccctataaaacgcttccttaagtcggcaacagaatgaactgttaagagagctgtcctgaaatacagacccctgaggtccagacatgttggaggagagccctctctttttgcagcacggactgggccagagaggtatagcctgcaagatgaatttcagtatgtgtaactgctggggtgatgattgcaagtaatctaagtttgagatgttgattgtgtggaataagatagtgacaagaagcatggaaagaaaaccataacatttaatatgcaaattaaatgattgatttgagaaatacttgtttatcagataccgtgctaggcactgaaaatatagaactggataaaacaaattcagtctctaacggaatttacagtctaggaggatgggtgggcaacagacaataaaaacgttaaaaaataaaagaacaaggaaactttatatagtaaaaaattctatgaagaaaataaaacagcttgaggttgatgtgatgggaggttggtgagtgaaagaagggatggtgtgttggtttcctagggctgccacaacaaattgaatatcaggttttcatctgtctattcattttttcaataaattaagttgcaccagtagaaggatactgtcccacgagggaattgaggtcagaagaactcggagaaaacagcaagcccactggaaagagatgatactcataagaagaactaaaagagatttactagaacttgataagccgtcgggacaaagagagctgagacttcgtctgtctgacaacatatgccgggcccggcaattatagagataattgtatactgaacaaatagggttatttgtggaagttggggacaaaatggcagctgccccctctgaggttcgaactcaggaccttcagattatgagactgacgcgctgcctactgcgctaaggaggcagacaactagtgctcctcagcaggtgttttcaacactgatttttaccttatttaaacatttttgtctacattacctttattttaaatttctaaaataaaatattcttatgaaacttctcaaagctcaccagcttccaaaacctgaatcagatgaagaaagtcgctgctgatcccgctgcttttgcccctcttattctgaactgatgaccccccacttctcaccttaggtggaaaatttccaaaacgtcctgtccagaaacctgacaattaacctgcacgggcgtccatccattttgtctggagagatcaggaaaacggcctgtttttctctctccctccataccggttctttcccgcaggaaaagtgatccggtgtttcccatccggaagcattgaagcgtttactatcttaaacaacaaaacaatgtcctttgacaggcgtctccacctgtcgctatctcatgtgctcaaacgtcttgtaaggccgtcttaatgtacagcaaacttcttgtaaggccgtcttaatgtacagcaaactccttgtaaggccgtctgttttaaaaaaatacctccctaagtcccactggcttttcaacccactgcagtcttccccaatcacgtctccgtctcggtcttgaggaagtccaaagggatttggacaaatgcaacttcatggggtaaagaatatggcgctcttggtgcaaactcttgggcatctgctaggatgtgagaacggtagtaatagcaggaaggggtgaaaagcttgtcttctccactgtctttgtttgccaggggattgtctggagtttagcactcaaagacccacttcccaggaaaaccctacctgggatgtgaaaagtccgggctttcggtttttggcgataggttggagagaatatatacacacaaaaagtgacaaccccatccttgttcccacccctgccccagggccgaaagcaacactgattttattgccaatggataatagggtttaggttatcccacttttgtagttgtcgccgtttttcccctgtccgctgatggtgacaaccttgcaccgtgcatcgctctgagtgaggcgacttaaatgcgcgatgttaccgttttcagccgtgaccgtagcactcggtctttgactgtagactgttgtgtctacatagtgctagtttgtattgctagtttaatttttttttttttttttgagacggagtttcgttcttgtcgcccaggctggagggcaacggcgtgatcttgggtcactgcaacagctgcctccagggttcaagcgattctcctgcctcagcctcccgagtagctgggattacaagcctgcaccaccacgcccggctaattttttgtatctttagtagagacggggtttcaccatgttggccaggctattctggaactgctgacctcaagtgatccgcccgcctcgacctcgcaaagtgctgggattacaggcctgagccaccgcgcccggccttagtttaatttttaacattgtgaatattatggccagatttttagagtttagataacgaaaacgagaacgattatcatgcgaacgccagcataacccagatagcactgaaaaagtctaagtagactgttacttcaatgacagatagaaggacacatacaaccggatttggagaataaataatcaaaacggagcatactacgcaatattcaaaacagatttggatgtgaaagtacacagggagacggcatctctcaagtctgggatgagacaggcaagaacttctgaaccaatcaaaagtgtttttgtctcccaaaagtgacaccagcgctctgtagagaatagcattgggcttgcttacaaggagaccttaaaaaaagttaaaattaaataaaagaaaatggtattgggcagaatattagaaaagaacacgcattattttatggcttccttaattactctatttcctgattcagaggttgcatctcgtgggtgaacaagaggaaattctgataccacatattggtctcttgcagtgtacagctgattctatcagacgaccttgctctctacaacataatgatgtgtcaaatccacctcaaccattaaaaaaaaagtttcccttagctcttacatactttgatttgaaacatgatgttgaaaatcatctttcctggtatgcatgaagacttaatgaaaccacttgaagcataaacaatcattgatatgttggtcaactacaagttagatcttgctcatctatctgcatatttggcagacagtgcaaatgtaaattttggcaaattccattcagactataaactttctaccaaagaaaatgaaaagatcttacatgtgacgtgttctgcacatgttgttcacaacactgctaagaggccgggcgtgatggctcacgcctgtaatcccagcactttaggaggccaaagctggtggatcacctgaggtcaggagtttgagaccagcctggctaacatggtgaaaccccgtttctactaaaaatacaaaaaatcaacggggtgtggtggcacatgcctgtaatcccagctactcgggaggctgaggcaggagaatcacttgaaccccagaggcagaggttgcagtgagccgagatcgtaccattgcactccagcttgggcaacaagagcgaaactccgtctcaaacaaaacaaaacaaaacaaacaacactgctaagaaggattgtgatttgtttactggtgatattgaggctttcatggcttaatgagatttatggtcactttttagtttcctcaaaatgtgcagaaacaataagaattttcactttatagaaacgaaaggaggtagcctccttagaaatgtctaaagttgactataattattgctggccataggatagatgttaaaatgtttacttggtgtaaaatcatattttcaaaatgtgggacaagaggaatgctattctctaatttgacaatattttaagagtgagaatggagaaaagaactaccgtaaaacagaaatttatactttcatttgtttgacgttgtcgaagaacaaaatttcaacacacttaggttaaagatcagatcaacttttattggcaattcatgaatcaggcagcatctcatctacaaaataggaaggtgctctgacgaggagatgaggttataggtagaaaaggctgaagaaactacaaacaaggaacaataggtggattggtaattacaaagtgactgtccttgtaaggttaaagcagaggatacttccttaacatgctggctgaggtagtctggacccttttctactggttattgtgaatctcctgttttttggaaaactggcctgttttaaatttcagtttgattacttggcaccctgcacaaagggctcccttctggtttggtctggtctgttggagcctaatgcaggagttcattccaaaacaatagcctcccattaattttaacaatgttatgttatgtagattgtgacataaagattcatacactaagaaaagattctttttttaaaaaaaaaagactgcttcagaatgcaagttaaataggactttatcaatctcttgctaaaaatacaatttatttggaatccaagctttgtttcccaaatttatcatttatttatttcattttatttattaatttttttgagatggagtctccctctgttgcccaggctggagtgctgtggtgcgatctcagctcgctgcaacagtctgctattgctagtaagtaaaataccgagtattcaatgctcaaatgcttttgttgagaggatatttagtgtgattttatcacactagaatgataccaggaatctaagtaatatgggcttgataagagcagagctgcaattcaaagtgaattttacctttgactgtattcagtattaccactatataaaagaaaataaagatgtcttaaatgttgcagacaggtcacagaaagaatattggaaaaagaaacagaaagggtaaagatactcgattgtttcatgcgacagaaagaaatgtcattattttttattaaatataggtaatatctgcttaagtagttttattgtagttatgttcttcttttacattcttgttgtattttacgtttttgtatttatgtttttcatttattaatgcgccttaaagttgaaataatatagcctatgagacttaaatatccaatagttttaaaaagttaaaataaatcactacataagagaacagatagaaatactaaaaacatattgttatatttttcccaaacatattatttatgtaattagtcctattataaattacttctaattgccattattaactactcctattgagaggtgacagcatgctggcagtcctcagagccctcgcttgctctcggcacctcccctgcctgggctcccactttggtggcatttgaggagcccttcagcccccccactgcactgtgggagcccctttctgggctggccaaggctggggtccacttcctcagcttgcagggaggtgtggacggagaggcacgagcgggaaccggggctgtgtgcggcgcttgccggccagctggagttccgggtgggcgtgggcttggtgggccccgcactcggagcagccagccagccctgctggccccgggcaatagggaacttagcacctgggccagtggctgcggagggtgtactgggtccccagcagtgccagcccaccagtgctgtgctcgatttctcgctgggccttagctgccttcccacggggcagggctcgggacctgcagcccaccatgcctgagcctcccatccactccatgggctcctgtgcggcccgagcctcccggacgagcaccaccccctactccatggtgcccagtcccatggaccacccaagggctgagaaatgcgagcacagggcgcaggactggtagccagctccacctacagccccggtgcaggatcctctaagtgaacccagctgggctcctgagtctggtggggatgtggagagtctttatatgtagctcaggattgtaaatacaccaatcagcaccctgtgtttagctcaaggtttgtgagtgcaccaatcgacactctgtatctagctgctctggtgaggacgtggagaacctttatgtctagctcagggattgtaaatacaccaatcggcactctgtatccagctcaaggtttgtaaacacaccaatcagcaccctgtgtttagctcaaggtttatgagtgcaccaatcgacactctgtatctagctgctctggtgaggatgtggagaacctttatgtctagctcagagattgtaaatacaccaatcggcactctgtatctagctcaagatttgtaaacacaccaatcagcaccctgtgtttagctcaaggtttgtgagtgcaccaatcgacactctggctgctctggtggggccttggagaacctgtgtgtcaaaactctgtatctaactaatctgttggggaggtggagaacctttgtatctagctcagggattgtaaacgcaccaatcagcgccctgacaaaacaggccactgggctctaccaatcagcaggatgtggatggggccagataggagaataaaagcaggctgcccgagccagcattggcaatcctctcgggttcctttccacattgtggaagctttgttctttcgctttttgcaataaatcttgcaactggtcactctttgggtccatgctgcttttgtgagctgtaagactcaccgtgaagatctgcagtttcattcctgagcccagcaaaaccacgagcctactgggaaaaacaaacaactccagatgcgctaccttaagagatgtaacactcactatgaaagtctgcagcttcactcctgagccagtgagaccacgaacccaccagaagaaagaaactccgaacacatctgaacatcagaaggggcagactccagacccaccaccttaagagctgtaatgctcaccgtgagggtccgtggcttcattcttgaagtcagtgagaccaagaacctaccaattctggacacaccattattgttttgtttaagtaataacagttttgcaatggagaaacaaatattgcagaataatatataatttcaaacatctatttttaaaatttgatgtcaaagtaatacatgcatttattatataattgttggattttttttttgtgggggtggaaaggtttggtatggctatgtctcagttggctccctaaaaagttgaacagcaacagcaactggttcaccagtttggggaaacactatttatgaaaagaataaagaattaagaggtctcagtgagcttcaaggacaacgtctggcttaacagataaaaatggatggtttgatagataataatggtttataggtgattggaggtaacaggatgattgccaatggcttttccttcttttcagatacttattctttgggtcatgaaactgcttctgcctgaataataaaacaattttagcaacactgaaggaagttattatttcctttctgctgtgaaaaaagattaaaagaggtcatctcataaacttgaggctggtatacttgaggtctttcattaacattcaaggatttaatatttgtgaaagaagaccctcaggggtctaatgaggaacatgttgtttttttttaaatttatttttattatttatttatttatttatttattttgagatggagtcttgctctgttgcccaggctggagtgcagtggagccatcttggctcactgcaagctccgcctcccgggttcacgccattctcctgcctcagcctcccaagtagctgggactacaggcgcccgccaccacacctggctaatttttttgtatttttagtagagacggggtttcaccgtgttagccaggatggactcgatctcctgacctcgtgatccacctgcttcggcctcccaaagagctgggattacaggcgtgagccactgcgcctggtcggaatgtgttttcatgaagggggaatatcaactgggccaaatgacattgagaggctgagcaaattgaagcctgaaaattgaacattgggagagcattgggaacattatggcagacgggagacaggactagattgcacctcttacttcaatggacggagcagcgtgtggaggccctcatcatgaattttaactccagaacgacttcaggaataaatccggaaacccgagaggacccacggaccctctgaaggaagcagattgctcctgtaggacctgggagacacctcaaatactgtgagtgcccaaactgtggaagtgagaaagggagatcctccgcccccgagcacacacccccactggggaaactgaaggtctactttacgggagaagattctgaatttatctggagctgagtcaatttagagagccaagggaaatacaggggtagaggaatcaattggacaggccctgtgagcttgctgggtccccaagtaggccactcctgctggcatcacagggatcctttgggagggcagccagaggcacagggaaaatggcacaggaagaaggaaacctccagctgagctttgtaacaatttgaactagtcaagaaacctcatggccagaacttgggggagggcatgaatccagcatgcagactccacaggtaggggaagaactaaaaccctactttctttcacagctgggaggcgggtagcctggggcaaattctcaactcttcttgcccactgcctggaaacagatttggtgctgttaggggaggcacagtgggagtgagactggcccttcagattgcatgggagctgggtgaagcctgtgactgctggctctcccccacttccctgacaacctacatgactcagcagaggcagccaaaatccttctaggtacataactccattgacctgggaacctcccctcctccacagcaaccgcagcaagacccacccaaggagagtctgaactcagacacgcctagccctgccctcacctgatggtccttctttacccaccctgataactgaacacaaagggcatatacccttgggagttctagggccctgcctaccgctggttcatctccatactaccacagttgatgttctctggaaagtgccacctaccaacaggaggccaaccagcacaaaaatagagcattaaaccaccaaagctaagaaccgtcacggagtccatttcacaccctgccacctccactggaacagatgctggtatccaaggctgagagacccatagatggttcacatcacaggactccgtgaagacaacccccagtaccagctcacagcctggtagacttgctgggtggctagatccagaagagagataacaatcattacagcttgaccctcaggaagccacatccataggaaaatggggagagtactacatcaaggcaacaccctgtgggacaaaagaatctgaacaacagttttagccttagaccctccctctgacagagcctacccaaatgagaaggaaccagaaaaccaactctggtaatatgacaaaacaaggctctttaacaacccccaaaaatcacactagctcactagtaatggatccaaaccaagaagaaatccctgatttacctgaaaaaggattcaggaggttagttactaagctaatcagagaggcaccagagaaaggtgaagcccaacacaaagaaatccaaaaaatgatacaagaagtgaagggagagaccaggtgcagtggttcatacctgtaatccctgggaggctgaggtgggcagatcatttgaggtcaggagtttgaggtcagcctggccaacatggtgaaactccatctttactaaaaatacaaaaattacctgggtgtggtggcgtgcacctgtaatgccagctacttgggaggttgaggcaggagaatcacttgaacctgggaggcggaggttgcaatgagctgagatcatgtcactgcactccagcctgagcaacacagtgagacttcgtctcgaaaaaaaaaaaagtgaagggagaaatattcaatgaagcagatagcataaataaaaaacaatcaaaacttcaggaaacattggacacatatatagaaatgcaaaatgctctggaaagtctcaccaatagaattgaacaagtagaataaggaaattcagagcttgaaggcaaggtctttgaattaaaccaatccaacaaacacaaagaaaaaagaaaaagaaaatatgaacaaagcctccaagaagtctgggattatgtaatgaccaaacctaagaataattggcgttccggagtaaaaagagaaatctaaaagttttgaaaacgtatttgggggaataatcgaggaaaacttccctggtcttgctagaggcctagacatccaaacacaagaagcacaaaaaacacctggaaaattcatcacaaaaaagatcattgcctaggcacattgtcatcaagttatctaaagttaaggcaaaggaaagaatcttcagagttgtgagacaaaaccaccaggtaacctataaaggaaaaccttcagattaacaacagatttctcagcagaaaccttacaagctagaagggattggggcccaacattcagcctcctcaaacaaaacaattatcagccaagaattttgtatcctgcaaaactaagcatcttatatgaaagaaagatagtctttttcagacaaaccaatgctgagagaatttgccactaccaagccaccactacaagaactgataaaaggttctctaaatcttggccagtcgcggtggctcacacctgtaatcccagcactttgggaggccgaggcgggtggatcaccaggtcaggagatcgagaccatcctggctaacacggtgagacccccgtctctactaaaaatacaaaaaattagccaggtgtggtggcgggcacctgtagtcccagctactcgggaggctgaggcaggagaatggcgtgaacccaggaggcagggcttgcagtgagccgagatggcgccactgcactccagcctgggcgacagtgcaatactccgtctcaaaaagaaaaaaaaaaaagcggaggaaaacggcatttcattcaaacggacaataaaattgagcaggcgtagctattcttatatcagacaaaacaaactttaaagcaacagcagttaaaaaagacaaagagagacattatataatggtaaaaggccttgtctaacaagaaaatatcacaatcctaaacatgtgtgcacctatgattgaagctcccaaatttataaaacaattacttaatagccctaacaaatgagatagatggcaacacaataatagcgagggacttcaatactccactgacagtactagacaggtcatcaagacagaaagtcagcaaagaaacaatggatttaaactataccttggaacaaatggacttaacagatatatacaaaacattccattcaacaactgcagaatacacattctattcaacagcacatgaaactttctccaagatagaccatatgataggccacaaaatgaggctcaataaatttaagaaaattcaaattatatgaagcactctctcagactacagtggaataaaactggaaatcaactccaaaaggaaccttcaaaaccatgcaaatacatagaaattaaataagctgctcctgaatgaacattaggtcaaaaatgaaatcaagatggaaattaaaaaattccttgaactgaacgacaatagtgacaacctattaaaacctctgggaaacagcaaaggcagtgctaagaggaaagttcatagccctaaacacctacatcaagaagactgaaagaacacaaactgacaacctaaggtcacatctcaaggaactggagaaacaagaacaaaccaaacccaaacacagcagaagaaaggaaatgaccaagatcacagcagaactaaatgaaattgaaacaaacaaacaaaaaaatacaaaagataaataaaacaaaaatctggttctttgaaaagataaaattgatagacctttagcaagattaaccaagaaaagaagagagaaaatccaaataacttcaataaaaaatgaaatgggagatattacagctgacaccacagaaatacaaaagatcattcaaggctgctatgaatacctctatacacataaactagaaaacctggaagagatggataaattcttagaaagatgcaaccctcctagcttaaatcaggaagaatcagatacactgaacagacaaataacaagcagcgagattaaaatgataactacaaaattaccaggccaagctgggcatggtggcttatgcctgtaatcccagaattttgagaggctgaggtgagtggatcacctgacatcaggagttcgagaccagcctggctaacatggggaaaccccatctctactaaaaatacaaaaaattagctgggtgtggtggtgggtacctgtaatcccagctacttgggaggctgaggcaacataatcgcttgaacccaggaggcaaaggtgtagtaagccgaggtcacaccattgcactccagcttgggcaacaagagtgagactccgtctcaaaaaaaaaaaaaacaaaaaaaaaattaccaggtcaggcatggtgacccatgcctgcaatctctttgggaggccaaggcgggtggatcacctgaggtcaggagttggagaccagcctggccaatatggtgaaactctgtctttactaaaaatacaaaattagccggtggtggtggcgggcccctgtaatcccaattacctgggagtctgaggcagaagaatcccaattatccaggaggcgaggctgcagtgagccgagatcatgccactgcactccagcctgggtgaccgagcgagactccgtctaaaaaagacaaacaaacaaaaaacattatcaacaaaagaagttcagtaccagatggattcacagcagaattctaccagacattcaaagaagaattggtaccaatcctattgacgctattccacaagatagaggatgagggaaccctccctaattcattctatgaagccggtatcaccctaataccaaaaccaggaaaggacataaccaaaaaagaaaactacagaccaatatccctgatgaacatagatgctcaaatccttaacaaaatactagctaaccgaatccaacaacatatcaaaaagataatccacattgatcaagtgggtttcataccaggatgcagggatggtttaacatacacaagtatgtgtgcaataaatgtgatacaccacataaacagggttaaaaacaaaaattacacaatcatctcaatagatgcagaaaaagcattcaacaatatcaagcatccttttatgattaaaattcttagcaaaatcgggatacaagggacatacctcaacgtaataaaagccatctatgacaaacctacatgcaacataatctgaatggggaaaagttgaaagcattccctctgagaactgaaacaaaacaaggatacccactgtcaccactcctcttcaacatagtactgaaagtcctagccagagcaatcagataagagaaaggaagggcatccaaatcagtaaagaggaactcaaactgtcactatttgttgatgatatgattgtttaccttgaacaccctaaagactcctccagaaagctcctagaatggataaaagaattcagtagtttctggatataaaattaatgtacgcaaatcagtagctcttctatacagcaacagcaaccaagtggagaatcaaatcaagaactcaaccccgtttacaatagctgcaaaaacaattaaaatacttagaaatatacctaaccaaggaggagaaagacctctacaagtaaaactacaaaacactgctgaaagaaatcatagacaacacaaacaaatggaaacacaacccttgctcatgggtagaatcaatattgtgaaaatgatcaaactgccaaaagcaatctataaattcaatacaattcccatcaaaatatcaccatcattcttcacagaattagaaaaaaaaatcctaaaattcatatggaatggaaaaagagcccacatagccaaagcaagactaagcaaaaagaacaaatctggaggcatcacattatctgatttcaaactatactataaggccatagtcaccaaaacagcatggtacaggtataaaaataggcacatagaccaatggaacagtagagatcccagaaataaacccaaatacttacagccaactgatcttccacaaagcaaacaaaaacataatatggggaaaggacactcttttcaacaaatgtgctgggataattggctagtcacatgtaggagaatgaaactggatcctcatctctcaccttatacaaaaatcaactcaagatggattaaggacttaaatctaagacctgaaactataaaaattctggaagataacattggaaaaacccttctagacattggcttaggcaaggatttcatgcctaagaacccaaaaacaaatgcaataaaaacaaagataaatagttgggacttaattaaactaaagagctttttcacagccaaaggacagtcagcagagtaaacagacaactcacagagtgggagaaaatcttcacaatctatacatctgacaaaagactaatatccataatctacaatgaactcaaacaaatcagtagggaaaagaaacaaacaatcccatcaaaaagtgggctaaggacaggaatagacaattctcaaaagaagatatccaaatggccagcaaacatataaaaaatgctcaacaccactaatgatcagggaaatgcacatcaaaactacaatgtgataccaccttactcctgcaataatgaccataatcaaaaaaatcaaaaaacagtagatgttggtgtggatgcggtgatcagggaacacttctacactgctggtgggaatgtaaactagtacaaccactgtggaaaacagtgggggagatttcttaaagaactaaagtagagctaccctttgatccagtaatcccactactgggtatctacctagaggaaaaaaagtcattaaacaaaaaagatacttgaacatgcatgtttatagcagcacaattcacaattgcaaaattgtggagccaactcaaatgcctgtcaatcaatgagtggataaagaaactgtggtatatatatacaatggaatactacttagcaataaaaaggaatgaattaatggcatttgcaatgacctgaatgggattggagactattcttcttttttttttttttttttttttttttttgagacggagtctgtctctgtccccaggctcaagtgcagtggcatgatctcggcttgctgcaacctctgcctcctgggttcaagtgattctcctgcctcagcctcccaagtagctggaattacaggcgcctaacactatgaatggctaatttttgtattttagtagatacagggtttcaccttgttggccaagctgggtttgaactgctgacctcaggtgatctgcctgcctcggtctcccaaagtgctgggattacaggtgtgggccactgtgcctgaccttggagactattattttaagtgaagtaatttaggaatggaaaacgaaacatgatatgttctcaccaataagctatgaggatgcaaaggcataagaatgatacaatggactttgggggaagggtgggaggagagtgaggaataaaatactacaaatagggtgcagtgtatacttctcgggtgatgggtgcaccaaaatctcacaaatcaccactaaagaacttactcgtgtaaccaaacgccacctgttccccaataacttatggaaaaattcataaataaataaattagttaattatgaaaaagaaaactaaccattggatctagcaagatggaggttgctgggatttgacaaggaagtttcagtggaatggaggggaggaaaccttggtttagagtgtgacaaagaaaggagcgcagttaggagtattctctattcattcacctattcatattcagatacgcctttgcaaagattatcacagtgagagaaatctaacatggctcactccatcttgcttctttctaccttcacaggctgatcatcctcactcattcttaggtgtaggccaagctaaccattggaggaatttagtttatagtttaagttggaagcaaagatgataatatccctccttgtttggggtgctaaaactgcctttgtaagacaaatgaaagaccataaaattaggattctgaaaggggcctgaattctgctaaaatgtaggtatagtttctataatcccttacggctcaggagtcatgtggtcagaggtcacatgatctgtgacttctccagttgttcctatagataacatcactatatagatcctaagattggtcttaaagatgcttttcagacttttgtattctaccaaccgactgaccccacctggatttgggactcacaactcaactgatcctatacctccctccaaccctccacgagaggtgaactcagcacatgaggaccgttttccacacccctgtgattgcatccccaaccaatcagcagcactcattcctttgttccctgcccaccaaactatccttgaaaaaccctaacttctaaaccttcaggaagactgatttaagcaataactccatcttccacgtggctggccttgtgttaattaaactggtttttttgtttgtttgtttgtttgttttttacctccgaacttcctattggtctcctgcgccccagagggtaccctgcttttgccaacttgatgtctcagaactttggtgtccttggtctcagacaccactttgccatccactcactatcgggcgggtggtggtctttcggatggtttgcatggagttgctgctgtccagggcatcacgaaggctgaagtcctcgccatcttccagcaggcggcggtaggtggcgatctcagcctccagctttaccttgatgttcagcagggcctcgcactcctgggcctggcgctatccgtctgccccggtctgtgtcagctctgactccaggtgcagcaggattccgctgagctgctccatctgcaggacatagcgggcctccacctccctcaagctgttctccaagctggccttcagatttctcatggagtccaggtcgatctccaaggactggactgtatatctctgctccgtgagcgtcatctcagcagctccaacaccgatggactgcatggtgaccactgtggtgcactctcaatctgctgaggccagtgcttgtctagctcctctcggttcttccaagacagctcgtcttattgggcccagatgtctgccatgatcttggcgaggtcctgagatttggggacatctacctccacggtcaacccagagatggcaatctgggcttgtaggccttttacttcctcttcttggttcttcttcaggaagagcagctcctccttgagagcctcgatctctgtctccagctgcagccgagtgacattggtatcatcaatgaccttgcggaacccatggatgtcgctctccacagactagcgcatggccagctctgtctcacactcgactctgaagtcaacagcagcaagtcgggcattgtcaatctgcagaacgatgcgggcattgtccacagtatttgatctgagcccccaggtcctccatggtcttgaagtaatttgtccagtctccgacctggcgtcccttcttctccaggtgctcccggattttgctctccagcttccggttcttggtctccatgcttctcactctgtccaggtaggaggccaggcggtccttcaggctttgcatggtctccttctcgttctggatgcctcccattcctgccagaaccccagccatccctgccgccaggcctccagaccccatgccgccccagaagctggtggagggggacgcggagatccgggaaccagagcccccggcgcctgcatagacgctggccgcgctgcagactggctgggaaccgtagctgggcgcctggacagagcccagggaccggtagttggtggagaaggtggagcgagtggtgaagctcttgctgtccggggaggagagcgagaggacaggactcaggctttgctgacgaccaattaaactcttaaacgcaataccacagtctcagtgaaatgattttgtctgtgcagggtgggggcaggaagaacctgtctggtgattacatgaccaatgattgtgagtgagacaaaggttttgtaagctactaatgctgataattaatcatgaaatttaagttgtgtaaagagggaagtaaagatgtaaggagaaaggagatgcattaaataattttccactgggcaaaagaaaataagctgaaaaaacagaaggtgataatcagtataagagatgattgaaatttacatcttgggcttggtgcctgcagtttaggttaatgtcaaggtcaagggtagtgtgtttttcaaaatgtatattgtgacacccttgtggcacatgaagttaattgagtggatcatgagtagaattttgattttagtgaaagagaatggaatgcaaaatgtcccagtgcattgcaaataaataagagttgtgttgtaacctatacttatattttttattatgggttccactaaaaaagtttgaaaaacagaatgggatatttagaaatgaaaaagtcaaggacctgggggagactaatggctgagggaatgcatgtccccctgcacacctgaaacccatttactagacaaggtttgggaagctctttggtgtatccactatacagaaagggaaggaagacaccatgagtaagatttgtttctcacgagtttcatatatacctggaaaaggtgagaagtcatagaagctggcttttgacagaataatgcaggcacatttactgaaaccatgatttttaaagcaggaagaaatcatagttctcaaattaaggaaagtgagcatatttctttctacaaaaagactatcttagattttatgtcgaaatatactcgtggttgggcatgacggctcatgcctgtaatcccagcactttgggaggctgagatgggtggatcactcggcgtcaggagttccagaccagagtggccaaagcggtgaaaatccatctctactaaaaacacaaaaaattaggctgggcacagtggctgacacctgtaatcccagcgctttgggaggctgaggcaggcagatcacttgagatcaggcgttcaagaccagcctggccaaaatggtgagaccctccccccacccccgactccgtctctactgaaaatacaaaaattaggtggtggaagttgaagtgagccaagatcgccccactgcactccagcctgggcaacagagcaagactctgtctaaaaaaaaaaaaaaatatatatatatatatacatatacacacacacacacacatatgtgtacatatatatatatttgtgctattattttcttatccttttttaaatcttcccttttctcctcattctccttcctctttcctcctcaatttgtgagatttctaaatacagagtcaattctttttgagcatgttaaggagaggattactatcaagcacccccatcagctttgtaggcttcttttcactgggctccaaattcagtcttgctgactctggtaacttcaaaacattttagcatgcaatagcatttctttgttttgttttgttttgttttgtttttgagatggagtcttgctctgtcgcccaggctggagtgcggtggcgcgatctcggctcactgcaagctccgcctcccgggttcacgccgttctcctgcctcagcctcccaagtagctgggactacaggcgcccaccaccacgcccggctaattttttgtacttttagtagagaccaggtttcaccgtgttagccaggatggtcttgatctcctgacctcgtgatccgcccgcctcggtctcccaaagtgctgggattacaggcgtgagccaccgcacccggctagcatgcaatagcatttcttcatctgaatgaaatactgtgttaaggcatcagactcaaagttcgttattcttttgttttcttattttttcaaatctcacgtcttcagaagaaaagtatcatcttggagaagacttgctgcttctgatggcaggcgactagcatcatcacatctgcatccttttcaatcttttcctctcttttacttcccacatcttatgaccttttttttttttttttgagacggagtctctcgctctgttgcccaggctggagtgcagtggcgcgatctcggctcactgcaagctccgcttcccgggttcacgccattctcctgcctcagcctcccgagtagctgggactacaggcgcccgccaccatgcccggctaattttttgtatttttagtagagatggggtttcaccatattagtcaggatggtctcgatctcctgacctcgtgatctgcctgcctcggcctcccaaagtgctgggattacaggcgtgagccaccatacccgccctaagggagtgtaattttgtctagttctgagttgtttttttgtttgtttgttttgttttttttgaggcggtgtctctcgctctgtcgcccaggctggagtgcagtggcctgatctcggctcactgcaagctccgcttcccgggttcatgccattctcctgcctcagcctcccgagtagctgggactacaggcgcccgccaccacgcccggctaattttttgtatttttagtagagacggcatttcaccatattagccaggatggtctccatctcctgacctcgtgatccgcccacctcggcctcccaaagtgctgggattacaggcttgagccaccgcactcagcctgagggagtgtaattttgtctagctctgagttgtttttgtttgtttgttttgttttgttttgtttttttgagatggagtctctcgctctgtcgcccaggctggagtgcagtggcccgatctcggctcactgcaagctccgcctcccgggttcaagctattctcctatctcagtctctcgagtagccgggactacaggtgccggccaccatgctcagctaatttttgtatttttagcagggacggggtttcagcatgtaggccaggatggtctcaatctcccgaccttgtgatctgcccacctcggcctcccaaagtgctgggattacatacaggcgtgaggcacagcgcccggccccgtacttcccacatcttatgaattctgtgtcttcagttcttctgagtctgtttcctttattctaatacaagattaccaccaccgttttacatgagactttttccctcctcttccttctcctctttctgtatctttcctggattactgcaacagcctccagtttggttgatttgcttctagccctgcttgtctcccattgtttctctatacagggagtcccactggtgccctacaaaaaaagatttccagagaaggtgaatgggggctgaaatatgacctgagcactgagagctaagagtcctggagagaggacttttgacattttcccttttctatgcttcatcagccctgagggttgtctttctgtaattcatccaccaaaatggcttactgtggcattttttttttattttattattatttttttgacacagagtctcactgtgtttcccaggctggagtgcagtggtgggatcttggctcaccgttgtctctgcttcctgggttcaagccattctcctgcctcagcctcccgagtagctgggattacaggcatgcgccaccatgtatttttagtagagatggggtttcaccatgttggccaggctggtctcgaacttccgaccttgggtgatccgcccacctgggcctcccaaactgctgggattagaggcctgagccactgcgcccagccttactgttgcattatttgcccaaaggcactctgtgtgctagctgtggctctgcttccacagaactggcaagaagagcttgcaaaaatacccgtcatactgacctctctgttcagaacacttttctgtctctccatagccttttagggaaagctcaaagtatttagtattgtcaagatacggctcacagtttgttcttacttcctaccaatatacaagagacaattccaaatggagtgatagacagaataatgctatttccacccaaaaatatgccccttctaacccttggaaactgtaaatatgttaacttacatggcaaagggactttgagatgtgattaaggttagggaacttgtgatggagagatgatcctaatcactagagtcttaaaagtggaaagaggaagcagaagagtagttcagggaggtgtgatctgaggacgccatccaccattgctggttttaaagagcccagcaacacagcagcctttagaagctgggagtggccattagcttacaggcagcaataaaacagagactttgatccaacaactgcaaacaactgaattttgccaataatctgaatgagcagaaaacagattctcccttggggccaacagaaaggaatgcagcctgccaataccttgattttagcacagtgagaccataccagacttctgtcttaaaaaactctaaataataaatttatgttttttataaccactacatttgtggtaatgtgttatgacagcaatagaaaactaacacatgtcttgaaatgccagccgttttactatttcttacaattctgtgaatagactgggcttacctgggtgattctgctccacatgatgtcagtaaggactccattcctctgaaggcttgattgagctagggatgttcaagatggctcactcacataactggcagtggcagttgatgttgctaggacctcagtcagttgagactgtgacccacagtgcctagccatggccttttcatgtggcttgggtttctcatggcatggtgactggattctgagagggagcatcccaagatttagcattccagaaaaccaagtcagaaggtgcaagatttcacatggcttagccctggaactggcacagtatcacctcaatgaaataattttgttaggtcagccaagattcactgtgggaatggactacaaaagggtgtaacgaccgaaaaatatgctgcattgaggtcagtttttggagactgtatactacacaaagtaacgattttttcctttgtagcctcatctttatcctttttttttgtttttttcagatggagtctcactctgtcacccaagctggagtgcagtggcacaatctcagctcactgcaacctctgcctccagggttcaagcgattctcatgcctcagcctctcaagtagctgggattataggtgtgtgccaccacacctggctaatttttgtatttttagtgtgtgtcggtggcggggggtctcaccaagttgccaaggctggtcttgaactcctgacctcaggtaatcctcctgccttggcctcccaaagtgctgggactacaggcctcagccactgcttcatctttttactttggtccatgaacctttgattttctgctcaggtctacttgaactaggaactagtaattttcccaggcattcatacctttttagctttgcttctgtcaggacttgatggtaaaaatttttccatgcccttctttatgtgcctaattatagcttatctttaagacatatttcaggtagcacctcatccagtaagccattcttgttcagattaggtgcctgtattggtgatcttgtacacagtaccctgcccttacacctatggaagaacttaggagtaaatcttcactctcactgatttacttgtctctattcttttttaaaatttatttatttatttatttatttatttatttacttttttgagacggagcctcactccgtcgcccaggctggagtgcagtggcgcgacctcggcttactggaagctccgcttcccgggttcccaccattctcctgcttcagcctcccgagtagctgggactacaggtgcccaccaccacgcccggctaattttttgtatttttagtagacacaggttttcaccatgttagccaggatggtctccatctcctgacctcgtgatctgcctgcctcggcctcccaaagtgctgggattacaggcgtaagccaccaggcccggccgtcttctattctttaacaggccataagctccttagaggagtgcattttgtactctcagattccccaggtagacctactgtatatggcacagaaaagggtctcagttaatgttggctgacagaaggagtgattgaacaattatctgtacatatttaccacttacacaaggtggaaatgcacccaacatgaaatcgtacaaatgtcatggcttccaccatggaaaaaattatgtatgcgtgaggacaagagctaaaaaacaagaaagaaaatgtctagagtcacttgtgaggctggaactgtggttttctttctttcctttctttctttctctgtttctttcctttctttctttcttcctttctttctctttctctctcttctttctctctctctttctttctctctctttctctttctttctctctctttctttctttctttcttttcttttcatgttctaatattataatgatgtgacaagaacttgtagaaccatcaggtccaaaagcatcaacaaccttgtcacttgcagcgtgggctgctgatcagcaacactgacctaacctgggagtttctcacaaatgcagaatatctacaccccatcctacacctacagcgttagaactcttcattttagcaagctccccaggtgatttcatatacgtattgaagtctgtgaaacccactcaacacagtccttcactctttcccttattaaatttacagctgtttgtttaattgacctttttgtaaaggttccgaggacaacatagtaagggatgctcattcatctctctgccagtgctttctgcggtctcttcagctagttctatcaggcacttctggcaatctggagcggcagccggctgggcggcgaggaaaccgctgcacggatcccgcctcccagcacacgcagtcggcagttgcagcctccaagaccgcggtgccaccaaaccaagcgccggacgcggtggcgcgcgcctgtaatcccagctccccgggaggctgaggtcggcggatcgtgggtgctcgggggttcggagctacggcgctgtgtggagcgggcgtccgcaccgggcctggcaccaacatggtactcccgggggagcccgggagtaccaggttgtctaaggagggggggaccaggcccaggccggacacggagcaggtcaaactccccgtgttgggcgacggtgggaccgcgcctgcgagcaacgcctgcagttccgcccgggacatccgacgagacccggtctcttttaacttcccttttcgggatttcttttaaaaaatcaacagcattatttctgcataccaagtgagttcactggtgggactggtatatgctaccctttgctcgatcttccttttttttttttttacccctcagggaatgatgattcattcagtcagtgggagccggaagaaactcgttagtgacttatcatcttggaaatttctccatgttgcactcttcctttccccaaacaacaagacagtagtctgttttgcattttgcaaatgcagttgcataagaatttaacaaagactattcgcttggccaaactttagtcaggcttctgaatcttctgctaggcccatctgtgcacttccttgtaacgtccagttttagcaaagaaccctgccaagtcagtttagcaagaacccccatatcatctatgtttaacctccatttctgatcaggctcctcattctccaccatcccccagatgattgatgtctgattaccttggcctgtcttcagcaagaatcctgttaggtttgtttggccagaattccccttacctctgaggttttctcttggtaatttcctgtccactgaccaggacacactgctccttggctataaattcccatttgcccatgctatattcagaactgaggccgatctctttccctcactgcaaaacctccttgcaatggtcccttgtgcctatcccgatagtcctgaatagtcttccttacattgctttcagaagtatcactaaataatttttttaaaaaacaaattgcatggcatgagaacttcataatctaagacagagatttggaaaaggtttgaacttccagctttttcaggaacttcccacataaaaacctgtacacaactattcttatcggattggataaaacacctaaagagacatttcaccgaagaagatatacagatggcaaacgagcacataaaaatgttttcaacatccttagcactagggaaatacaaattacgaccaagatgagatatcactatacatctatcagaatgactaaaataaaaatagtggcaacaaccaaatgctgatgaggctgtatacatgtaggtgggaatgtgaaatgtagctgttctggaaaacagttggcagtttcttaaaaagctaaatgtgcaagtaccataccacccggcagctgcactcctggacatttatcttggctaaacgaaaatttatattaacactaaaaccagtatgcaaatgtttatggtagctttatttgtaaaagtcaaaagctgaaaatgactcaaatgtctttcagcaggtgaatgttcaaactggtaaattcataccacagaatgctagtgagcgagaaataagaatgaactactgatgctgaacaacctagatgaatctctagagaattacactgagtgcaaaaagccaatcctaataggttacataatgtatgattccattttcataacattctcgaaatgatgaaatcataaaagtgaaaaacagattactagttgccagaggttgaggcaggaacagtaggcaagtgggtgtggctgtaaaagggccaaaaggaatccttgtggtgatggaaatgttttgcatcttgactttatcaatatcaatatcaatatccggattgtgattttgtgctatagttttgcaagatgttaccattgggggcaagcaggtaaaggggacatgggacctctccatattatttcttataactgcatgtgaatctacgactacctaaaaattaaacatttaatttaaaaaaagaccaaagtcattaaaattggagggatagggagctgaaagggaagagcaagagagtatggagaaaaataatggagagtcaagttgatacaggagatacaaagaaattgcttaggtagttagggcaaaagagtcctcggcagaacttctcttctaacaaaaagcagccctagaaattattccttttctaacaaagagcagcctgcaagatggagctgcagacatagataaggaagctggaaacttgcatgggggaaggctggcagctgcaccgatagaaaaggtctacctgggggtgaggcatgtccaccatgaggctccaccttcccttttttgttagcatgtgtacagtaagaaagaaatgggcaacatggagaagttcaggcagagaacccacctgcataataacagattggggtgagggttgccagagattcacaccctatgcagttggcacacctggtcctatctgggtttttcatgccttatgtagatcagacaccatctccccactagctcatctgtaaaaccccctgcatttcaccgaatttcggcaacccatttttccaggacccctctctgtagcagagagatattttctttctttcgcctattaaatttccactcttaacctctctgtgtgtccaggtccttgatctctgtggctgtgagacgatgaatctagggtgtcaccccagacaacgaggctgcttcaaaatcccaaagtccaaaggaggactgcttcataagggaaggattgtttataggttggtatactgtgcaaaattaagtataggaccaaaaacagccaagacatttgaaagttggaaagttgatggtaatggtttcctgggattggaaggcagacctcctccgctgatgagcaaataatgaggtaaacattgttctttcaacaggtttggtgctgagtggaaggaaagagtctgaggataatgcataaggtcatgtgttccatttttgttgtccaaagatagaggtttagacattctgtaatttgaagagaggcacgtaaggaggagagagatgaaagacacaaacatagagcaaaatggaatgggtagagggttcaaaagctcagatggaatattaagtagacttggaaatgagagaccattcctccgagtaggaagacaggggttgaatatgccaagagctagcaaattaggaggttaggaaaaaggtggctgagggaatatgctggctgtctccctttcacagcgcagcagccacccctcccctcccccacctctagcaagtagccactttttcaacagcttaggcggctcctttttccaggaaacttcccttcagttcaccggccgtgcctctctctatccttttcctcggagcaggctgtgctatgatcaaggcattgtgacccctgtgacccacacgtacacatccagaaggtctcctggagccagaaagtctgggacaacaggaaaaccacaaaagaagaaaaacagctcctgtcttagctgattagccaaccttgcgaccttctaccattgtaacatgctctaccctaactgatcaatcaacttcgtgacactgtgctctgtgacccctcccaccttgtgataatgtaccttgtgacattcttcccttgcccgcaataaacgggcccttattgtatctttccactgcttactcctaacctataaaactagctgcaatcccaccaccctccggtggtgggactcccttttcggactcagcccgctcggaccagagtgaataaacagcttgttgctcacacttagcctgttcaggttgtctcttcagttagacgcgcgcataacactaacaattcacttaataaatatttattgagggaacagaggtcgcaaataaaatgtaattagtattgctcaagattaaacttctttcagcacgtttgccttttcttcttttatctagtgagatgttgaaacccatacctagagttctgctacagaaataaacgtatcccacagtgttcttgcgatttcctttatgaatttgagaaaaatatgaccccattttaggttctaaggagtgtttctgtattgtagaaggaaaattccatatttgtattgccgtgggcacaaaaaaccgagcgctctcatgccgaaacccgggatcgaaccagggacctttagatcttcagtctaacgctctcccaactgagctatttcggctccgcccacgccacttaaaaataaggcttaatgaatttattacttatgttttttatttactattaggtatttattaaaaaaaaaacccacaatgacaggtactccgaaggaaccaaagacaaattaaaaaattatttcgttcttcaaatggctcaccactttatgcaaagaaaagcaagaagacaattacaaattgatgctacaatttattctcggttgaatgcacacatcgaaacagagcacgttccatcatccagttacgaacttcccaaattactcttatggcattgccacgccctctgccgtccagattttattggttggtgcaaaacaggaggtcagtgaatacgagagcatgaccgtgcactaactcgtcggaaaagtagaagtcaactgtgtgcgtatgtgttgagttctcgcttcataaatatgttttaataaacctacttcagcttccctggtggtctagtggttaggattcggcgctctcaccgccgcggcccgggttcgattcccggtcagggaatgaggtttttctgttttaacctccaaattctttcatccaggaacgaaatctctgagtaaacagcaaattgtggataagttaactttcaattttcataggaggcattttctgcatagaaaccctgttcctgttttagtattccaggtacaaaatgacaagcaatgtaattttcaattattttaaaacatttattaatgaatacttaatctagcgtagaccgagtgtccggcattgttctaagtaagcgctttaacatttttaactcaattgggtgattcagtaagcgggaaattccggagacaatccattaggagttagttgagattagcataaccttttgaaaagacagttatgaagatgacagagaagaaatggcgaagtcatttctgggagatttgatcgctgtgttcaagcttctgaagctgctagagcctcggtggtttagacacctactctatcttcctcggatttctctgtaagtttcacgctgctccaactgggcgctaggggatagccctagaaatacctacacagtaatttaatattctgggccaaagcagtttcaggactgcttcatctctccagcgcttcaaccttttttcccctatgaaggtacaaattatgtttttttcctaagagaggataggagaaggtcataaacatgaaattaaaacctgctgtcacaaaactgagaaacaggcaaacaatgaattcagcaccatctctgaatgcacatttggtaaatttaccgagagctactggagaaaaagcagactttttgtttctctcctgacaaggtttggtgaccctgtgctaactggttcctgtctgacaatatcggggcatgaatctttgtttcttggtctgtctaaagagcagctattgcttattatttctttcttatatctgctaagagtttggggcacgtatgacttctctacaagtttccaaacaaagatcgtggtgctcctgatcttatttcaccaacaaatggaatatgtgattttttgtttgttttttgaaatggagtctctctttgtcgcccaggctggagtgcagtggcccgatctcagctcactgcaacctccgtttcccgggttcaaacaattctcctgtctcggcctcccgagtagctgggattaaaggcacgtgccaccactccaggttaatttttgtatttttagtagagacgcggtttcaccatgttggccaggctggtctcgaactcctgatctcaagagacccacccgcctcagcctcccgaagtgctgggattacaggcgtgagccaccgcttccagccaggatgtgatgttgttatgatccagttaaatgaagcaggactttttctaattaattgcactttctcttctcttccctggctccatatattcacagtttccaaaacttccttgagatgggacactcttttgtcatcttgtcagttctgtccttgaattaataaactttgacacatacataagatcaatttgactaagaaatcttattttgacatagacataaaagtaatatggtttgtaaaattcctgtatatacggaagccttttaatctaatgtttcataggaattcaaccctctaggcctgctggtgatcagttcttgaaaagcaccctcttttcgtgatatcacacgttgtctcctctatgtgcagcaagaatctcttgcttcattagtttttatgcctctgctttcagaaaacagtctggttgggacccctgtgaaaggaactgtctggcttaacttatcttgattaatgcctctttttttcttttcttttcttttctttcattttccacataaagctaattggattagagaaaaagaactcttcttcgaatgctaccagtttctttccttctcatctgagctattattcattgtccataggaaaaaaaattccctaattttggcacggtaggttctgtttattcaccagacttgctaccgtttactcgtcagctcagagagaacgtcgaaaaaatataacaaaaccaaaatatgcatcaagacaagaggaggaaagagaatgtgaaagactactaaaaaaaaaaaaaaaaaaaaaaaagtcaacagctagggtcaaggaatcaatctgcaaatattcagagccagtaggcttgtactacactagtcactatggaaaatgaaaaatgaccaagacagaaatctcacctcttaacaccccccaaatcccaattttctcaactgtaaaatgggaataaaagtattacagtatttactatataaagttgcgatgagtcaataacataatacacaaaagcagtcagccaattatccaaatccgtgttattaatattatcatcatcatcattcttctcaccgtacttggggaatgaaggagacagatactgtgagtaagttttccttttttttttttttttttttttttttagacagagtctcgctctgtcgcccaggctggagtggagtggcgccatctcggctcactgcaagctctgcatcctgggttcacgccattctcctgtttcagcctccaggtagctgggcctaccggcgcccgccaccacgcccggctaattttttgtatttttagtagagacggggtttcaccgtgttagccaggatggtctcgatctcctgacctggtgatccgcccgcctcggcctcccaaagtgctgagattacaggcgtgagctaccgcgccccgccaagtgagtaaattttctattgggcacagagttacctgctaaaatgaagtgtggaaaaatacaatggggtgtgtgtatgtgagagagagagggagatttggaggtggggtggggaagaccctatttgaagtgggctttgaagaatgaacaagatttttattagggaacaaaatggaaaccagcattccaggacaagcgtctcaggagaagcaaaagcgcagagttgtgaaagctcttagattttcagaactttgaattctgaactatatataaacctggaaaatctcggttaactatgggatggcatcaagatttcaatttcaagctttctggtcatgcacagtaaagctggaattagagtctcttacgtatggcagttgttgacaagtccgtacaggtacctaagtgcttcccagaaaattcctcaagttggtaggtcctgggggaatcagtttagttctaaagagaggactcatcagagatctgttcaacttccaggaatctgtgaggatagctccaaatctcactctcatgcccagcctatcaaacaaagcaaaccggttggactgaagctgtgggatcgggactgaaatagaaccagcgagaaaggcagtcctcctcgattcctagagagaacacattcagccagcagttggatagaggatactagcaagtccctcgccagggcgggggagcagagacacattcctgtcccgtttacattcttcctctggcggaggcgggagggtcgcttgaagcctcggatttcgagatcagccaggacaaaaaagcgagacccccgtttctaccaaaaaggggggggggtgggcggggggaagagagagagagagagaaaggaaaagaaagagaaagaaaagaaagaaaaactaggcgcggtcacgtgtacgtgtagttccagctgctcggaggttgaggcgggaggatctcttgagcccagaagttcgaggccgcaatgagctctgatcgtggcagagcgaggccctggctcaaatacatacatactttgttctgactttgtgtgcccttactctttcctcaggtgcacgcttgggctcgttactgctcagaattttagaatcacagatccagcagtgatcaggcagctgcagctgtcagggaccaccaccacctacgcgattgatccgtgggagaagccgtcctactcttttctttctcctttgtccttctcattcctgaccccttcaggattctcagtcttccctccgggaggtagggattctacggagagagaagggttgtggggcttgttctgttgcgggttcaaacccaaattgtctttttcttttcagacttttggccagtcttgtctcgctccaacctcctacccccaccccattcctcagtgcattcgtgaatttctccaagcaggcctttccagatcgacactaagttccaatcccgagctgtgtgacccagcaccaattcagtcacgatgatgacttgcaattgcttaatcagttggcctttcctcctagctgtgaaggtgaggaccgccggtgtcagcgttcgtcctgaatactcagtgcccaggcacagagtaggcattcagtcaatacttgttgaacgggttaatggattcctgatgttcactggttgatatcgtcactttcaaataatttctcccatttttctgttttgttttcaccctcctagtttaccgtgcaggattgcaaacaccagagagaaaatcagtctctggaatgatgcctttgatggaccaagatgcagctgatgaagcattgaaccaattagcacctagcaggagggcacccttgctctgtgtccttgaaggttaaagctgtcaaaaagtggtctccctcaagttcggccatcttgctctcagagatctagaactggtaggagaatatagccttgatagtggagaggaaactattgctgttgtgagggactgagagaaccaggcagagagcccagattgacacagcaggtgacaaaagaggcgcgcctaccttggggaatacggaggaacagaggaaagtgagaccaggagaaagagcaggggggcgggtgtgcaggccgggcgccgtggctcacgcctgtaatcccagcactttgggaggccaaggcaggcggatcacaaggtcaggagttcgagaccagcctggccaatatggtgaaaccctgtctctactaaaaatacaaaaattagctgggcgtggtggcgaatgcctgtagtcccagctactcggaaggctgaggcaggagaatcgcttgaacccggaacccgggaggcagaggttgcagtgagccgagatggcgccattgcactctagcctgggcgacggactgagacttcgtctcaaaaaagggagtgactgtgttgcttttgctttcttggaaatcttttttcttagtaattttcctaaagtaatttccttaggaaataatgtattgctaagagtattgcaacttttagtattgacgaggtacttttactgaatcagtataagtcaacaagcaaccaccagaagctggaaaaggccaggataggattttactctaaagtttctagagggagctggacgcagcccacaccttgattttggcccacatactgattgtggatttctggccttcagaaatacatatctgttgtaagagaatacatatctgttgtttttagacagtttctgataatttgttacagtaaccacaggaaattaacaccaggcactatgcagtaaattccgtatgaacaactcaaatataagaatttgtaagacagccgggcgcggtggctcacgcctgtaatcccagcactttgggaggcgcggtggctcacgcctgtaatcccagcactttgggaggcgcggtggctcacgcctgtaatcccagcactttgggaggccgaggcgggcggatcacctgaggtcgggagttccagaccagcctgaccaacatggagaaacccccatctctactaaaaatacaaaattagccgggcttggtagcgcatgcctgtgatcccagctactcgggaggctgaggcgggagaattgcttgaacctgggaggcggaggttgcggtgagtcgagatcgcgatattggactctagccaactccatctccaaaaaaaaaaaaaaaaaagaattctaagacagcatagtttccactggcatattggataaaaacttccgtcagcagtgattttaatgaagatgaatgacaaaacaataagaaactccagcgctagttaactttctttattatgatcttatttgtcataattttttgcacaatgcgtttttattttaggactcagtcaaaattttgggccaaggagaccgacgcgctgtcgcctgcactaagagaaacgcaacgaacaactttgtcaatgcattgcattatactatagcagcaactatacttttaaatgattcgaatcttgaggtttcaaactgaaccgtcttgtgccttttgcccggcgggcatttctgcggggaccgcgggtcaccttctgaatttttaccttcataaacagcaaggactgcgctctttcgcacggcgccccgttttttcgtagagttccgtcggccaaaaccacttgaaactcgctcagcggcgtcggggctccagccaggcgtcaccttccacagcgaacctgcgaaccacagcgtcccctgggggtctccgtccgcgtggccgcttcctcttacatcggtgacgcaagggaagggcgtctaggatccgccggtttccttcctcactgctcccatcagtgcgaaagcaacgtgttgggggttcggggtgtgtggcggctgaacagctgcctgaagttctctgatggcgctggagggagctccagagaagaggtcatggggagaaggcacaccttaaacgccccggggtggggggggggggcgacattccctaatgggaaaaaagacacaccttaaacgcagtagagggcgacattctctactagggaaaatgcggaagaacacagttgtaatcaacggtagcgtggccgagcggtctaaggcgctggattaaggctccagtctcttcgggggcgtgggttcaaatcccaccgctgccaagtacttttcattctcactagggactgtttttaggagaatccctttccaaatgttcagtatgaatggttcttacgtatcaatcccattctcctcttcgacttctgtttaccacggagccagagataaccgtccccagaacaatgttcccccattatttagaggacagtgtactccaggcgcctcagatacagcaatgagtgacacaagcaaaaaaacccttaatggcacatacttagtgaggtggcacgatctcggctcactgtaacctccgcctccccggttcaagccattctcctgcctcagtctcccgagtggctgggattacaggtgcgcgccaccacgccctggctaatttttgtatttttagtagagacggggtttcgccatgttggtcaggctggtctcgaactcctggcctcaagtgatcctccctcctcggcctcccacagtgctgggattacaggcgtgggccaccgcacgcagcctgaaggattaatttatgtttggaatcagctgctgttcttcctccagcctctctgtagtgtgctcacttcacacttggaaccatagttatatggtatagagaagagacaactctagggaaagtgccagtgccttgccttaccttacaactgccagacacacccagtcaggtaccttctctgtgggcttctcagtaccccgtatctctgtggttgccgggggagccctatctctcctcggagcagttctctctgcatacttctggtctgtctctcattctctagacctcagcttggaagttgtttctccttggaagccttccctcatctccttctcttcctctttccagcttcataaagtttgggagggtatggagaggataaggaagggaacagcacagaacgtccttgccccacggaactcagagtttagtggggttctcatgggggttcacaaggattagataagttattgccctaatatggggcaaactctactaaaaaggagatagctttctatgtgtagattttgaatgatgttccagatttaagagaataaaaagaaaataatatgaattgtatgttagaaagaaggactgtcacagaattgttcccaactgggattacaggtgcaggccactaggtccggctaatttttgtatttttagtagagaggggcgttttgccatgttggccaggctggtctcaaactcctgacctcaagtgatcctcccacctgggactccccaagtgctgggattacaggtgtgagccaccacgcctgaccacctttattgatttttgaatgctaatccaacttctccatgctagaataatcttaacttgttcaagacatgtaatcttttaaaaaatgtatattcctggattcagtttgttactatctcaagatttttctcactacattcatgaatgataatagcctgtaattttcttttttaaaaaatttccttgtgttgtttgtttttcctcatcgttccctaatggtttggtattaaggttatacaggcctcataaaatgagtttaacattgggattattttcccttgcatgtttagtagaattaactggtgaaaacatctgacccttgagttttctttctgggaatatatattataggttctatttaaataattggtatcagactattcagatcttatatttttttcctgtactagttttagaaacaagagtcttcctaaggaaatataccagatgaacctggaaaatcttttcaccagaaagcaaggaggctactgaagactactttagtcatgttaaacaaaaaaggcttgtgctgacacctatgaagtagtcttacccaaatcaaatctaaatatagaatttgataaagcccttagatctaactattaatttttaggacatgcaggggcagaggaatgtgttaaatactaccaaaggtgtgcaataattaaaatccaaactgtgaaactctgcagcaccagcaacctagttaatcattaaataaatttcaagaaaaaagagatatagggagaacttatatattaaaatacttaagatacataccaactaatcacaatgtattgaccttatttgaatacttttttttttttttttctgagacagtgtctcactctgtcacccaggctggagtgtggtggcacaatcacggctcactgcagctttgacctcccaagctcgtctcccgagtagctgggaccacagtcatgcaccaccatgcctggctaatttttgaattttttgtagagacagggtcttgctatgttgcccaggctggtcttgaactcctgagcccaagtgatcttcttgccttggcctcccaaagtactgggattacaggtgtgagccatggtgcctggcttggttttttttaatgttaagaaaaaatggcattagagaaaaatttgaacagcgaatgaatctttgatgatgttgccaaatagataattttgtttaggtgtgataactgtactagtgttagtttacttatatttttggtttgttttttagagatggggtcttgcaatattgcccaagctaacctcaaactttagggctcaaggagtcctcccacttcagcctcttaagtagctgggactacagcataggccgtcgtgcccctggctctattattagtttgttagttagtttgtttgtttgtttatttatttatttatttattttgagactgagtcttgctctgtcgcccaggctggagtgcagtggcgcgatctcggctcactgcaacctctacctcccgggttcaagcaattctcctgcctcagcctcccgagtagctgggattacaggcgcctgccaccacgcctggctaatttttgtatttttagtacaggcggggtttcaccatgttggccaggctggtcttgaactcctgacctcaggcaatccatccacctcagcctcccaaaagtgctggaattacaggtgtgagccaccgtgcccggcccatattgttagtttttttaaacagtcattatctcctatagacaattaaatacttatggatgaaacacaatttctgtcatttgcttgaaaataatcttaagcagagggaatgggtggggatacagatgaaacaagattaaccctgacgtaataattgttgaagctgaatgatgtgtacatggagttcatttttctattgccttaactcttgcatgggtttgaaatgttctataataaactttattttttatttatttatttttttgagatggagtttcgctcttattgcccaggctggagtgcaatggcacaatctcggctcaccacaacctctgcctcccgggttcaagcgattctcctgcctcagactctgagtagctgggattacgggcaagcgccaccatgcctggctaatttttgcatttttagtagagacagggtttctccatattggtcaggctggtcttgaactcctgacctcagatgatctgcccacctcagcctcccaaagtgctgggattacaggcaggagccactgcgcccggccaatacattttttttaatagaggaggactataaaacctatgggaagctctgatggcacgactatgacttgctgatgttcactacaggttatctggctaggccacttgctgagaaactcctgatgtatcttcaagtctattctggttggatttctcactgaaaactgcgtcttttgtctgggaggtgaaagccagaccctcatctttctgggagataaggaaagtaggctggaggcgttgacattcagtatgctcctttttcaaatggaattcctgtcctccatgtgtctagcccacatatcctttgtttaaccttcttcagaaaataaacctccagtcttctttgggcttgaggacctaggactctgcttgcttcctaaatagcctctgacagactctcctcgttttagtctattcattctcatttccaggggtacatggtgccaccaattcttgagtcgcttaaagattctatgatgtaaaataaatgtctttttttttttcttttcttttttagaaggagtctcactctgttgcccagactggagtgcagtggtgcaatctcggctaactgccacttccgcctcccactccccagtagctgggactacaggcacgcaccaccaagcccagccaatttttctatttttaataaagagacagggtttcaccatgttggccaggctggtctcaaattgctgatcccaagtgatctgcccatctcagccacccaaagtgctgggattacacgtgtcaaccacggtgcccggtcagatttgtcctttacttgcccccttcaggctaaaatttagctttctcaaattcaatgtcattattacttatccttttttcagtttccaaaattttgtagttgcctcttctgccattcttcctgattatgaatggttttactgtagcattagtgtagttctgagggggagcaataccaaatacacgtagtcaagctacaatccttaccaagaagtatcttatcatctttcttaaacttaaatgaaattggcattctccatttcttttgtgaaggtaaaaataatctcatatcagtgttctggtaaaaattttgtgtttgcacgtggaatgtaattcgatttaaaaagtgagttttacctggtgatttttgtatgtaaattataacttagactaactcttgtttggtaactcttcagaattagaactacagatatcttagggtttcaagcaacatgttttgtcattcaactatgcacctgaccttcgaattccttcagtattattcttaccaaacttattaccttatggcagaatctgttccagttgagtatctcctaaatgtacagatgtcctgtagcttctacttgtggattgtaattctattctgggatagttgcagaacaagattaacccactgttcataaagtagtccttcagaattttcaagacatatctttttcaccaggtaaaaatctaaaatttattcaaatacgctctcaaaatattcattttatgtgtttaggaaacatcaaaagacttctggaggtcagactagtaatttcttttttttttttttttttttgagatggagtcttgctgtgttgcccaggctggagtgcagtgacacgatcttggctcactgcaacctctgcctccagggtagctgggactacaggcgtgcaccaccatgcctggctaatttttgtatttttagtagagacagggtttcaccatattggccatgctggtctcgaactcctgacctcgtgatcctccctcctcagcctcccaaagtgctgggattacaggcatgaacccccgtgcctgactcttatctgtgatttctaaacctgttctctccctgcctcccttttcactttgaatcttagcaatcctgatacaatatggagaagtaccattctagctttatgttaaaaaaattgctaaaaatgattggtgtttataaattacaaactgttttctgctgaactgaggtataacttcatgtcggaaagatgtggtgcacgcatatgggaattgcctaggaaagcctgagcacagaatttactagttacgtgatcctgggcaagtttgttaatctttctgtgcctcaaattcctgatctcatagggatgttgtatggatttaaaaagtttaaatgtgtaaatcccttagaacagtgcctagaacacagcaagcactaataagtgtttattaatattaggaagtgattgataaactcttggaagtaaatgtgctcactgaaaaaatagtgaataagaaggtaaaggacaatgtctttggggaatctcacaattaagggtcaggaaatcaggaataactaatataagagacagaaggaccagcctaagaggtaggaaaaacagaaagtaacaccagaatcgttatactcaggcactggtcaaaatactgactactgaggtctgagaaacagtcactggagagagggatttcctactcccatcaagttcatgggtactccatacttgatgttttcttttcttatgtccagtaagatttgagctcactctaaaagcttttccacattcctcacattcataaggtttctccccagtatgaactcgcttatgtccaatcagagctgagccctgacggaaggacgtgccacactcactgcaggtgtatggcttctcaccagtgtggattcttttgtgctgcctcaggactgaactatgatggaaggccattccacatacctcacatttgtgaggcttctctccagtgtgaattcttcgatgattggtcaagtttgacttcccactgaaagctttcccacactctaaacatttgtaaggtttctctccagtgtggattctctgatggatggtaaggcagtgcttatcttggaaggttttcccacaatccctgcattgatagggcttctcccctgtatgctctcgttcatgagccctgcgcttacagttatgacgaaaggctttcccacactcctcacacctgtaacgtttctcttcagtgtggatccttctgtgtttggtgagttctgccttgatgctgaagtcttttccacactggggacacccatagtgtttctcccgagtatggattcgtttgtgtttgcttaggtctgagctccgactgaaggcccttccacacttgctgcactcataaggtcgttccccagtgtggattcttatgtgtttggtgaggtctgaactcccactgaaggccttcccgcactcctcacattcatatggcttctccccagtgtggattctgccatggatggtaagggaatgcttaaactggaaggccttcccacagcagttacatttgtaaggcttctccccggtgtggataagctgatgcatacagagacggttcctggtcttgaaggccttcccacagtccctgcactcgtgaggcttctccccactgtgggtttttttatgtcggcaaagagctgatctactgttgaaagccttcccacactgggtgcaattaaaaggtttctcccctgtgtggattatccggtgcatagaaagctgatttctggtcttgaatgctttcccacactcattacacacatggggtttctcaccagaatgaatttgctcatggagaattagatctgagtgccaactgaagtttttgccacacctggcacattcatggagtttctgtgctataagaactttattacattgactatgttttgagtttggattcaagtttttactaagcactttctggttctttccttttttgcaggtcacttcctcagagccttctttctcttctctcagtttctcccttatagatgtttcccattgattctctaatttgacatcctgaacacaaacttctctaaccttaggatcccgggaatcaacttttaggagactgttaaatttcatccagtaggcttctccattttcaaaaatctcttgttgtgaacttgccttttcattctcaggccacatcttgtcagctgacacttaaacaagaaaatacaaatgtcagagggaaggaaataagtgagatgggaggcgtgaagcaatgttaagctgtttgaagagtaaataacttttccatgctggaaaaattactaacgttgtggccaaaagtcagaacaggctgaaataatgaaaagtattgagatattttacactcagcacactttataaaaaatccttaaaaacctattcctcctctatagtctcctagtttagtgagtgtaaactctatacacctagtcatctaagccacaaaacaaaataatcttcaactctgtctcccttgtatttacccagctaacattttacaaattctacctgtgaagagagttacagaggaggtgctgaaatgctgatgcagtcccttttcaaggaactgtctgctttgctcccaagggtgggccctggagagccatatttctgttatgtgactcagcccatctggttggggcagattagatctgtgcaatacctgacccaaaccaggtcagattctctaatcctggactttagaattgtgatctgacggcaggtaaggccagctctaagagtagctcagtctttagcacttaaatttgagaactagtggtggtgggatggtatttggtacagaggagggaatgttctgccatctggtccgagaagaagagaaggtcaatttgcctagaaagaagaatgaagctgactcacaaagaagcagggaatacagttggaaacctgatggttttgagtctcttctagggcctgacacatagctgcccttaggtcccatgacacatcctgaataataaataaattcatgtttttctgcttaagctagcttgggttaatttctattgctgtcaaccaaagactccaaatacatcttattaatattatctctgaactctatctcttcctctttatttccactgccagtgcattctcactaattgctatatccctcaaacatcctttaccctgaatcccttctaatccatcctctgcactgcttccagattattctctctgaaaatcaagtctaatcatgtcactttttagcttaaaatacttcaatggcactccatagttaaccagacaggaagaaagtaaagcatacggtcaagagtcctggctctagagtgagactgcctgggttcaaatcctagtatgacagttaataaatcttaatacctgtgtgaacttgggaggatgacttcacttctcctttgcctcagttgctttatctaaatgagttaatgtatgtaaagcacatgccacactgaagtactttaatcaatattagctgttattgtaagttcaagttttgtagtttaaattccttaagaaaactcccaaaaaacagacgtcatatcatgatcttgcccctttctactacttatgaacctccccaaagctattctaagtcccctgctctactcacactgaacaattcatagttcatattattttattcctcaatgctttctcacatgttattccttctgcctagaatgactctcacctgtctcaatttatgagcactgcagtaactgacacacagaagggtaataaatattctgagattttttttttttttttgaggtggagtctcactgtgtcccccgggttggagtgcagtggtgtgatctcagctcactgcaacctctgtctcctgggttcaaatgattctccggcctcagacctcccaagcagctgggattacacccagcatgcaccaccacacccagcatgcaccaccacacccagctaatttttgtatttttagtagagatggggtttcaccatactggccaggctggtctcaaactcccgacctcaggtgatctgcccatcttggcctcccaaattgctgggattacaggcatgagctactgtgcccagcctctgagccttttttgagggccaaattgcaaaaatctattagataggttgcaaagaaccaattagataataacagaataattgcccaaatagtttgtcactgtttcaattttcttttccttaagtttcctaaatgggtttcctttctgggcccttcgactggatgatccaccactgagaatgttccataaccattatgccacatggaagatcagagggaactgaaagtttctctattactcacctgggtaggagcagcttagggactccctgtcctgtggatcctgcacacaggggtctacttctcgctccagatgagagattaaaggaggtttaggaaatggaaatcctggttgcagagaagaaataagtgtgtagagtaacttataacttaataacttataacttagctaagcagccctgatccttctgtttgtatatgaaaacaggaaagaaatgttaatttagatagagaaaagggtttttcaggggtctagtaacatgtaaaagaacatgtttggggactttctcagaaaagtcacactcagaaggaaagagaagttctgggaaacagtcatttgggtgtgctctcctgttttttttttttttaattttattttgttttactttaggagaatgggagtctggtataggaagactatcagtttcaggcacatagaaggcagttcttgactaggagcggaatatagaacaccccataaaaaaatgagaggcttgaggaagcaagaacccagggaaaacagaaggtaaatgtctccttttaactcattccaaatcagaaaacagcaactaggttagccaaaaaattatcttgctatgtaatagaggcaactcaaaactcttaatttttgggcaagatcctgatgataaagaataaggactctttcaatatgagaccttatatacatcaataaataaatcaattaaataataaaaaaagaaggtagaaagcattaagtgtagggaaggtccttaccaagtgataccatgttcccataattttccaacatcacatccttatagagatgcctttgagcgtaggtcagacactgccactccctgttagtgaagttcacagctacatcctcaaatgtcactgactcctgaaataatatgctcctgctatcctggagaaaacgccatagtttcctcaggaaacagaggcagaagaaaggaatttgcaaggaggaggtttatagaagtgaaaggctcttcccttttggtgggtatgtacaaatgagatgaaagggagcatggggttttgatagcaaaaaataatgaaagagaaaacaacccacaagtggtttatcatgcaacaaaatgttccttatgagagggagaacattgatttaggagttgcacagccagagaacgcagtgaaaacaaggccatattttggaggtagtgatgtattttcaaggaggaggaaaggggcctcagctcacttgggcctggctcattagtgtgatatctgcttgcggcaggtttccttggcttccatctttagtgaaggcaggatatggagcaggtaatagagctgagggaagataagtaagccaagagtcaatatagcacagtattaatgaaatctcctgcattcgtcttctcttcctcaaatgtagaagcttctgcagctctaacctagggctttaggctactgccttacagtatccttcctcttcattatttttctagtctcaacttccagtgttgggcatcaggccctggcacagcagccaaggcagctcttggaaatgcactcttttcctgtctcacctactgttttcctgtggtctttgtcctggaataaactttccccctccccaaacagatctggtaaaaaggcccaaatcacttattccctggttttgaatagaccttcttcctgtatttgaatactgaagtcatttcttccaaaatacttggggtagaaggagggtgaaaaagagtgtgtgcatgcacgcgtatgtgtgtgtgtgcatatgtgttgaacagaagcatccagggataggaccaaagcttattttttcaggtaacttaatggctggtctacctccagttagttacaaatttttttccttattcctcttagagaagaatcattcttcccgattttgcacatttttcctactaattccctagtactgagttatcctccctatgtcaatatagtatagcacacagagcattttaaaatgcaaaagaaactttataaagagtgtccaagtgttcaggtataatccatatgattgggtgagaagtagtttctttttttttttttgagacttaagagtctcgctctgtctcccaggctggagtgcagtggcgtgatcttgcctcactgcaagctctacctcctgggttcacaccattctcctgcctcagcctcccaagtagctgggactacaggtgcccaccaccatgcctggctaattttttgtatttttagtagagatggggtttcaccatgttagccaggatggtctccatctcctgacatcatgatccacccgcctcggcctcccaaagtgctgggattacaggcatgagccaccacgcccagctgagaagtagttcatattactaattaatagggcctgactttattccttgcaggccagctcaatctttctgtagcttcaatgtttaaggtgccttatttttcttgatagtttatcaacacatcgccaagtccaaatctgaataattgctgtctgcttttaagacaccagcagggtcaaagtaatctattggtaagattttataatcaccctttggatttagacctccaagactatcattccatttttacgaaaaaccgatttagaaccaagctgatttcttttcactgaaattgcccaagaagactcttctttagtttcagctacttatagcttttgaccaagaccaaggctgcatctcagtcatggtggttccatacagtttttccactgtctcactctaaaagctccgagctcctttataactgtctcaaaaagtctaaactcatctggatggcacacaactcacagcagacacatgtttgtgccttgttaatgttacataacagttcttttccttataacattaacacacttaaagctctcaattggatgttttcaaccattattttattatgaatattttcaagtatatagaaaagttgaaaaaattatatagtaaatatccatataccaatcacttacattccacaatttacgttctgcaatatttgctttatcacatacttatccatttatctattcctctctctgttcattaatgtattttattttttgaatcatttcaaagtaagttgaaagcatcagtacacctcacccctaaacagtttaacatgtatatcattaactggaagttcaacatttgtttaccttctttttcgaggtaaaatttacatataatgaaatgcacatgtcttaaatgtacccttagagaaactttgacaaaagcatacccctatgtaactcattccctactggtttttaccatatcttcttcacaactgggaaagtctgtcactcatagtgattcataagctttattttttagctttagctttagaaattgaaaggttattcctcttaagttaaaaatgaatttaggaaacaggctacatgaaaaaacaacataaaactttttgttaaagcagtatacagatatcttgtgggataagattaatacatttgtattgtattatatgataggtggctacagaatttctgaccctgaaaatccaccacagcagatttcacgaccatttgagaaaaagaagactgggagactcgtgcatccgagtttagcaatagctattattttttatttctaaatctataaaaaatttatgttctatattattaattctcatttgtgatcccttgtacagcagatatctcaggattcctcctctagatgtttcaacactatatctagaaacacattttatttttattttttgcaggtagcatatactaaaaagcttacttttgaatgtgcctactcctctgtccaaaagtctatgcctttctgggtttgattttatgactcctgaattgctatatactatctcctaggttgcacctccaacagcaatttttttttttttttttttagacagagtctcactctgttgcccaggctggagtgcagtggcatgatctcagctcactgcaacctccacctcctgggttcaagcaattcttctgcctcagcctcctgagtaactggggttacaggtgcattacaccacacctggctaatttttgtatttttagtagagatggggtttcaccatattggccaggctggtcatgaactcctgacctctagtgatccacccacttaggcctcccaaagtgctaggattacaggcataagtcaccgcacccggcctaccatcagcttttatacaaatcttaaccacttttcctcctcacatacgccaccaaagagcacaaggcttcaatgggaaaacttttgcttcttcttttgtcactgctttattttatattttggagatatctatacatcatttaaaagtatcagggctccagaaaggtctgcagaagtaaaattgtatatattcaaattttacatgttggcaaaattatgtttgggtaggaattactgaattataccacaagttttataagtgtaaaatatgtgcaaatatgtacgctatttaccatatatctcaggttatacaaacagtaaatgcctgactgcattgattctttctgataaattgctttgtagaatcttttacacactgatttttttcaaaatttaagatactgacagaaactgaatatttagttcctctagatattgatccaagcctcgtatagaaacaaaataagactttctataaatgctcattaatgaacagatttttgggccccagtgtggcattttccacccactctgtgtccttactacattctcagctgccgtgactcctgccacaatctcctgtgtatctcaccgctttcctgagggagctgggtatcctggcgggtccaaagcagctggcttggtggtcctgaactctcatccaacagcacaacctattgcaagacacagaatgaattcaggaaagttatgaaggtgagaaaaatacataggaagatgcaagcaaccatacaggtctatccacagaaactgtctcccagaaataccaaaagaagggagaaaataatggactcagttcctaataccttatgaaaactagaaatggcatctacaactacaaagctttaatgatcaccaggtcaagcagcaaaaacagtatctaggaggagacacctccaacagtatctagagtcagacacacctccactcacactgctttccttctttcttggactcacttctccttcttcctccttgtgatgtatcacagaccctcctcttcttacctcctgcatctttttactcaggtttctttaacagtcttccactgctgtcctggtttcttcctactggtcagatccagttctcaaacaagctgtgaagtggctccagttgatgccagcctcctttggagaacacatgttttggtggtgccagccaaagggcccttcttgacccacagtgccgctactgtttggcttaatgtgtcaaacactgccctggatttggggttcattagcaacactaaaccgctgtgatctcacatcttgtttccctgcatatttggtgaagggaaaagaggaatgtgaccacaggaaaaaatagggagtcactgagaacctgaggcacgaagtcaaactgaaaatgtgaacatatccagaatacaatctcaacggctaccacccttgtctgagccaccatcacctgctatctcccctcctttccattactgcggtagtcttctaactggtctcctttcttcaatccttgccttcctcctttctttttttttttttttttttttttttttgagacggagtctcgctctgtggcccaggcgggagtgcagtggcgcaatctcggctcactgcaagctccacctcctttcttaatagggcagtctgagtagtccgtttacaacttgagttggatcatttcatcgctctgctgaaaactctccagtggttcatacttaaaataaaacctgaagtccttaccgaggtatacaaggccctactgaatgtgcccgtgacttctaacttcctctcctgctcacccaaaataagagctgaagtcttaagagtggcatacaagtctacaggatgtgtcattctcaacaccttctactcttctcccactccctcaatcttcagccataccgaccttccttctctttcatcttagggcctttccattggctgctcccttcaccttaagcgatctccatggctaataatcttgcctccttcaagtgttttcttataggtcatcttcccaaggaggtctactctgagtgccttatttaaaattgcagcctatcccctccttccaatcctgatgggccttaccttgctttacatgaattcttcttttcctctatagcactttataattttccagtatggtgcataagttacttattaatatatacattgtttacggtggttctaccttcgctaaaatctaggctcttaggctccatgagggcaggaatttttgtcgtcttgttcacagttgtattctcaacgcctaaaacagcgcttgcaatagtatgtgctggattaaaaattagctgactgaatgaatatatgaatggatgctgtagagaagaataaaaagaatgggtcaggaggcgacaagagcaagactccggtctcaaaaaaaaaaaaaaaaaatgggtcacgagcccctgggaggaggtagggcaaatgggcgggaaatgctcattttggggaatggcttcgagggaggaaaccgcagccgactccctcctcaaatctggccccaaagacccgcccctgcctgcaaccccaggggcccgggtatttaggtgaggggggcgacggcggcaccggactcctctcctctcagctgcaaattccgacccacgacggcccaaggcacagaccttcccgccggtactctccccaagaaatgagaaacagaaatatacagaagctccacttcctagtccgccaattatcatttccggtgattttctaggaaaggcgtcaactctctggtctaggcgttcccttaaactctccgccctcctcctcgcggctcagccttctaggagtttgcgtgcgtttatggcctgtgcaaaggggttgcagaaatattacccttttgctccttttttcccatgtagaggaacctctagataggaatggacagaagttttgtgacaaatatatgaaaaagttacttttaaatattaactaagaacacaaataattgaatgtctttttcaaaagtaaagactattttaagcctatgcagaagtcgaaagaagagtataattaacccatatatacccatcatttacatttaaaaatacataaaattctgccacacttgtttcatccatctccattttttcttgctgaaacgttttaaagcaaaccccaaatatcttactttcaacttcattatgcatttattttaaaaaggatattttcctacagaatcacaataccattatcccatttaacaaaataattcctggttatcatctaataccaagtccatattatatttccctaaatatatacatatgcttcttacatttgttttctatttcattcaagatctaaagttccagtatttaatttgggcatgtgtcttaattcttttaaaattcacatctgaactagttcctccttccatcctcctcttcgtcttcccctcatatagtcaactaattgaacaaattgggacatttgtcctgaatgttctacatgctggctttgtctatttgtgtccccattttattagtttctctagcctcatatttcctgtaaaacttgatgttacctctaaaggtttgattagagttaggtttaactttgttagtaagaatccttaggtggtgctatgtactttttgccacacatcaggaagcatataatgtttttgatgctaagattgaccagtgggtttaatacttgatagctgaatccttccatgtaaactttcccactggcttttaatctgatagattcagccaccccatttcattagagtttgtaaaattgtaatttttctaattcaataattttttcacatttattagttagaactcctctataaagaaaaactttccttcatcaatttagcaatttagggctatttggttatcctgaaatgtagtttgtacaggaaagaaagactgtttaattttcaacataattgccaattttcagaaaaagcagttgtgccttaggtgccatcaatggtaaccaccttacaaaatgtgatagccatcctataaaatggctagctgggccctactgtccagcattcacatccttgtgtagcccccttccacattgtaccagggttggtttgtgtgactgaatgatctggtaaaagtgatgctatgttttgtttgtttgtttgtttgtttgttttgttttttgagacagagtcttgctctgttgcccaggctggagtgcagtggcgcgatcttggctcactgaaatcgccacctcccgggttcaagtgagtctcctgcctcggtttcccaagtagctgggactataggcatgcatcagcatgcccagctaatttttatattttagtagagatagagtttcgccatgttggctgactggtcttaaactcctggcctcaagtgatctgcccaccttggcctcccaaagtgctgggattacagccatgagccaccgcacctggccgatgctacattatctctaatattaggttataaaataatctacggcttctgttttggtctgtttttctttcgtagatcacacacccttgggaaagccaaatgccatgttgtaaggagaggcccaggtggtgaggaactgaagcctcctgccagcagacacatgagtgagtttggaagtggatctttctaccttagtcaagctttcagatgactgcagccctggttgatgtcttgggtgcaaccttatgacatacgcaggaccaccagccaagctgctcccagatttctggtcttcagaagctggggaatggctttgagggaggaaactgcaacagatgtttggttctaagttttataactaatgcaaaattttgttttctctttttgtgcatctaatgtgcactaatgtaaaatctttttgtgcaactaatgcaaaattttgttttctctttttgtgcacaacatcaagtgttctgcatcagttgataactaatgcaaaattttgttttctctttttgcatatcaatatgaacacatggatttaaaaaaatacattcaatgagtctcaatcaattgcagtagttattctttttaatgttcaaattatttcatctttggtcagtgggagtccctttattttatctcctgtgtccttttcatccaactctaagcgtctttgcttttttcctttatggcaagataaatgtttcagacacatgtcatacatttcctgcctcagacctggaatcagccatttttccaaggtgttctggtgctttcagtgggggcaaggattgcatacctttgtgaatagtcatggttagctgttttaaaaatgtatcaaaatgaaataaaatttgcttaattatgagattaaatcctggctaccccactcacaatgtgtgtgtatcataccttagacccaccctagtttgtctatctgcaaaatgggtccagtgtaaatacctaaatttcagagccgttataaggataaattagttaatacgtggaaatcacttaacacattgcctggcatcaaatttcatgatgagaataactgcaaacctggaagatactataatggtaatgaggtatactttcttcattttatacttgagaaaattgaggcccaagagattaaaaacttgtttgtacaaaagaggataaaattagaagagaatctaatgatttcagactcttggatctcatacctagactactttggatataaatgcagcctttccagcccagtcgggtcttctatttattcaaagacaaaggaggtaagaaaatacttggcacagtagcaataaagtggtattatgggaagtgcagaaactttatattgagaagatcttgttcctgattctgcaacttgttagctatgatactgtgagcaagttacttaatttctctgtgtcttaattgctgcatctgtaaaatagtgaaaacaaatcccttatgcacaaattcattgtgagagggttaatatacatatattgtatatgaaaatgcctggccatattgcttgctgaataaaaatcattatacaaaaataatttcttcaatcccccaattttataaaattttattctcatctaatggaaattggcattttaagtagaatgatccctaaggatactaagtctataattttgtaaaggactttagtgaatactgtgcaaaggcactgtgcaaggagctacaggagagatgctatgcgtggtcatctaccttccaggctgactgggtacagtctttcttcccaatattaatctacttaatagtaataatgtccagttcacatatttttgtgcaatacattcatgaaagactgctataccctttgctgttataaagatacttccacagtagactgttagcatatactttaataatctagttggattaagagacatttatttacattatttcctctaggctaaccacaatcgctcataaaacatctcctaaaataattaatactggaattttaccagggatccatgtcaaatttttcaccctgttaattccacagttcaccttcttactttttgaaaatttggatatttgtcagacttgggcatttgttgcactactcaaaaatgggcttcaggggtcctgtggccaatcctcctgaactttagtatgctttaagctgggcatgaaaacttgtagttactgtttaactaccttccttatgtaaatgtttgtcctatcattctcaacttgaaggtcacgacacttgatggagatatgaaagcctgataatgttaagtaattttatggcccttctgccatctgtcaaaattacaaaattcatttcctggggcttttgaaaaaaatagcaaatatttcaggcatactaaagagtaatataaagaacactcaacatctagcttaagacataaaagattatatacacaattaaatcaccatgtctactcctcaccaattccttcccccttccttcccaggttaactactatcttgattttgatgttattattcccatgcatgttcacatatttttagtacatacgtgggtagccacaaatattatatagtataatttacatgttttacaaattttatacaaatagtttcagtttgtacatatcctttgagctctaaatacttgatttcattttggttcaatatttttggcaagaatacattataggggttactatgtaatttgtactcaactttacatgtagttttgagatttatccttcatgaaaaatgtggctctagctcatccattttaactgccatagacaggtcttcccattttccttccaataatctttttaattaacctgattgtttttcagttcaactcagaacttgctagcaagtattttttttgtctttgatatttcatttaaaaaatattggcaatctttttgaaataattgttttcttggaattttcccttctaaaagggtaatttcccataatttttggtagaaagtttatttctaatatgggaaagaacaatctaaaaagtatttactatggtacatagaggaaacttaaatgcatattattaagtgaaagaagccaatttgaaaaggttacattctgtatgatttcaactatatgacattctggaaaaggcaaaactatggagacagtaaaaagatcatatatgtagcatcttaaccaaagaaaaaaaagttcagtggttgtcaggggttggaagtggagaaggatgaccaggccgagcacaaagggtatttttagggcagtgaaaatactacgtatgattatgtaatggtggatacatgccactatacatttgtccggactccaggtgattgtcaatgtaggttcacccctccggttggggatgctgagagtgagagagctacacatgtgtggagcaaggagtatgggacatctctgtactttcagctcaattttgctgtgaacctaaaactgctctaaaagataaaatctagtaaaaaaagtatttattacttccccaaacttttaaatatatcttttgtgtttaaccttattacttacatagatggaacaattttctgttcaaggttctgctcataatcattatattgaaacataacatgataaaaatatattatagaaaaataccatatattggaaatatattcttgaaaatacagaatacattacttataacgtatgcttgttggccctcatgatcctaaaagttatagcacatttaaatgtatgtgacttatggttctttttaaaataaagctactgagaacagtcaaatggtgatagatcagtcaaagctgctttgcgtccattttgttcagactcatttcaattcattcttcaacaaatatttctaaaagcaactgtactaagagcttggaataacatgaatgtacaaaacggttaaagatctctgccccgtggagcttatattcaagtaattctaattgactcgtgctttcattttctttgtttttctctttgtatactgaagaggataaatttcatattcaagctaatctgttcctcccaaatggtaacagtgcaacactggccaagctgattcagacagcacagcttcccggtgtctgcagggctggaccaaagagaagagtcttccgcgggtgctagaaaagcgaagcacgcgttaccatggagactgcggaatggaaaagcgttcggtttcttgtttcctagccgcgaatggggtcgtggttccttcgacctcgcctggggagaaaggggacggagggcttcgggctatacttgggccacacagccgggaagctgaggccgcggggcaggtctgcgtggcggcgtcgagtccgagcggggaagcccctttgcgggaactctggggcggggcggggcggggaggtgggtagggagggtcccgccagcagaggcatcttatttttaacctcttctcggctgtttttctctcgtccatttgctctcctcctttaagccatcctttaatattaaacattaaaaaatatatttggcaaacatttgaatagagcgcgcttattctgggtcaggtgtcgttttaaatgctttatgtgtgctaactcatttaattctcaaacaatccaatggggtaagtattatcattatcccaatttttagataggcctggagaagataataaacttgccaacagtgtcacagctggtaagttgagggtgggaaaccccggcctaacacatatattttctttttatgttctgtaaggattgggatccttttcattttattagacagaaaaggacagttagcactgtcattgaaccctcaacatggtatgatctcttgagaagattaagcagccatttggtggcagattgatcactttgaaccctttctattaataccttgcagtgggcagagactcatccttatagggatttgtatgtattccaggtataattttgcttccctgtctccaatgcccctgctaatactacccaaggactcacaatgtctgatgtactgacatggaaccttgccttacatctcagaccaagggactcactttactgtgaaggatgtgttacaaagggcacatgatcatgggatctactggtcctaccttattctatattacacagaaatggcagcctgtttttccccagctttgccaacataataattagcaaaactttttaattatatgataatatatttcaggaagaaaacactgacaaccgtgaaattcaaactagatagtagagaaactggaattggggagaccagttagaaagcggtttggaaacaaagatacacatgagttttaaagctgtgggctaatgtagatgttgatgtgattataagtctctgttaaaagagttagggtgaggtttgaggtggttttagattattatttttgctaaagaacccagaaatgactaagtttatccctgtcaatcacttctgacactctactcatatcatgttcctaaggaagttgaacaaaaggagcgatagccaaatgggactaactataatagctaatatttattgagtacttattaatactgtactaaagatattgtgtgctacattttacttaatattctatggggcaataagcagaactattcagaaatgatcctgggatctcactctagattgcccaggaaatgtgctagctacaactggagtttcccgttcctcttggaaagaggggctgcacctacgtatagctttgcatgagaccagctgcttacactttctaacacgaaggggctgcaactgtccataggatgcatggtctccaggtgttgggcatctggtcctcagatgcttcctcagctctgctagcatctaaacccagactgcccggcaatcaagtagtctgcttgttgtcttactgaaaagtggtgttcaagtttatccttgacaagatagaataattgggtcaggaccagagccccaacctattgcatgtgaaatggcttgttcttgcccctggttcacctctccatgggattatgagaggattgagaactctatgcctcttgtgcctgactcttgctttctaagtttccccagtaaatcttattcccattccttcgttcatactatgtgatgttgtagaatttattgcaaggcccattgtaccacatccttgcagcaaatttatgactcagaaattactatttctatcttagagatgaggaatatgagacagaaaaagtcacatagcaggtaggtggtaggatttgaaaccaagtcatctagttcctgagcccatgatctcaaaaactttgttaaactaaatggaactactaatttataaagagctaagtgagtgctcagataatcaaataatcacccatggagaagttcaaatctcttgcagaagttcagatctctgttggagcatgtagcctagatttaacctccagtggtgcctttaactttgtcctaagtcttaggcttgtgtcaactgctggccagctacatggaggaaataagttgagaaaaagcaggaagcaacatggctgggtctacagagaagatccaagtttagctgtctcatgctctttgggcccagaggagaggaaaagcaagacaaagtcttaaactttccaccagatatcaagaccttgttgatgtcctagaacatgaccaatcagattaatgatggctctacctgggaagagtagctgagaaaggattaagttgaggcaggcctggtgtgggcagatgttgttgaatgtttcccactaccccttccagcccactggaagaatgggttttttaaaaaaacatacactcaagatgagctctattagtcatttcctcatctcacttattattccagttaaaccaaggctgaaggacagaaagatcacaaacttattaatctctggacaaacctagctcagggccagaatcaggagggtgaatctcaggaggctgtaacccaactgattgcaaataggattttggaataacagtttctgaggtgtcacaaagaactgtcagcccttgtgtctgttctctaatagaatttttactttcttctatgatcccaaatttcataaactcatactataactaggaagtaggcagaaatgtccttttgatgaaccaaataatcagaaacttttctaataatcctctttgtgtatttttccagccacagaactgagtcattcattacccaaagctaaaccctgcctacatggtaacgcttttgtaaatgggattctttctctctgacatccctttttcctgcagtcccttataccctctcaataccagtgtggctcaaggggccttcagttctgtcctaattcagtctcacattcaagctgcacctccttaggcaccagaatgcgagagaaggttgttccttcagggaatattttcttttggcagggccatgtcactgagtcaggcttactaattatgtcccaaggtgggctcagcctctggcccttcaaggagcttagagagctctggagagctaaaggacgcaattccactcagttcccctagggacttgttttgttacgaccctgtagcggttgccgccagcctcccgtccccggacagcgcgcctctttcctccgcgcggaatctcgccttgccgagaggtgacagcgtggtgccaggcctcgctcgctctccgcgcctcctcggcctcggcgcccactctggccgcgctcgaggagcccttcagcttgccgctgcactgtgggaacccctctctgggctggcgaggccggctccctgtttgcggggaggtgtggaggaagaggcgggaactctcttgcgggccagtgcgagttccgggtgggcgcgggttccgggggccccacactcggagcggccggccggcgccaccgctccgggcagtgaggggtttagcacccgggccagcagctacggagggggcgctgggtcccctaccgctgccggcccacccgcgccgcgctcgcgtgcttcagccgcctcctcgcggggcagggcttgggacctgcaacctgccatgcccgagaattcgcggtgggctcctgcgccgccggagcctccccgacgattgccgccccctgcttcacggcttcccgtcccatccaccgcccaagggctgagaagtgcgggcgcacggcgcgcgggactggcgggcagctccgcctgcggcccgggtgcaggatccaccaggtgaagccagctggactcctgagtctagtggcgacttggagaacctttatgtctagctaagggattgtaaatataccaattagcactctgtatctagctaaactggtggggacttggagaacctttatgtctagctaagggattgtaaatacagcaatcagcactctgtgtctagctcaaggtttgtaaacaaaccaatcagcactctgtgtctagctaatctggtggggacttggagaacctttatgtctatctaagggattgtaaatacaccagtcagcactctgtgtctagctcaaggtttgtaaatacaccaatcagcactctgtgcctagctcaaggtttgtaaatgcaccaatcagtgctctgtgtctagctaatctagtggggacttcgagaacttttgtgtctagctcagggattgtaaacacaccaatcagcaccctgtcaaaacggaccaatcggctctctgtaaaatggaccaatcagcaggatgtgggtggggccagataagggaataaaagcaggttaccggagttggccattgtaatttgttttgtcctgtttcacattgtggtggttttattttttactattagctgcttggatctgcattttgttttgtgaggtgtaacactgtgagggcctgtagtttcactcttgaggtcagcgaggccacgaacccacctggaaaaacaaacagttccagatatgccgccttaagagctgtaacactcattgtagaggtctgcggtttcacttctgaagctagctagtcgacgaacccaccaaaaggaacaaactccaaacacgtctgactatcagaaggaacaaactccagacacgttttttagaactaacaccctgagggtctgcagcttcattctagaatcatgccaagaactcacaaatttctgacacattgcttttccgcaggaggttgcgggaagacgtacaaggaagggtcgggatggtgcttgaggtggtcagagccacacccagggctgcattctcatcagagacacctctaagttactgcgaagtcggagacaccagaaaggaagactccaacgtattccgagaggagtggaggcaaatgggatagactagccctcccgcccgggatcccgcgtctcggggaacggagacccgggcacacgccacttgcttgctgggaggttccttacaagttacatagagggggagcttttcctggccaaacgtgggttattctcgttctcccttccccacactgtcgcagaggaggaagacgtcttggtcgccgttaagagctaaaacgaacgccaaggctctaagtggccctggggtccaggctcgccggaggcaccagcgtgtgcaggcccggagcgccgtcttctgggcgaggagtgtcattagtaacactttatgttgcggataggtgaaagaaaaactgacgcttcggagatgggggtgcccaaagaggaagagagaacagcgattagggccttaaacctcacacccgaacaaattcggccggagttactgagcggcaggctctctgatggagatgggtgctttcagacttaagacgtgaaaacaaagatcagccactcatgaacgaactcaaggctcactgagatgcaactgccatgaagaagtgggtgcagggtgagaggtctgtctacctccttagaaggaccactgtggcttgtgcagagatccgaagtttgttctcattacaatggggacggtgagtgctagtaatgtggaccatttttcaatagcgccaccttgtggcagtgacaaaatggccgtagtggacttgggctcaggtgctttcttgagtgtgcaaactggtaagaactaattttttgaatcagatttggggattattcaggcagaaggggatccctaaatggaaacactgacattttaatactgcaagtgggggatgatgaacagacaaataacaagcaatggggggccacatttgtgttcagaattcatggaacttttttttttgatttttctatttctcatttttttaatgtatgtattttgagggtacatgtaatattttgatacataacgtataaaggtcaaagataaggataatttgtgtgtgtgtgtatatatatgtataaacttaaatgtcctttttgcttggaacgttcaaatttttttctagttatatctaaatatatatcaagcaatcttttagatattttgaaatgtctaacattattttgagacagagtctagcactgtcacccaggctggagtgcaatggcgtgatctcgactcactgcaaccgctgcctcctgggttcaagcgattctcctgcctcagcctcccaagtagctgggattacaggcatacgccatcacaccgggccaatttttatatttttagtagaggcggggtttcaccatgttggtcaggctggtcttgaactcctgacctcgtgatcggccacctctgcctcccaaagtgctgggattacaggcgtgagccaccgcgcccagccagaagtgtctaatagattatagtcaccctactgatctattgaactctggttgtctttcttctacctaattgtatacttataccgtttaaccaacctctctttatcccacgtcttccctcctctttccaggccctgataaccaccattgtactccctagcttcatgagatcttctgttttagctcccacataggagtgagaacatgcagtattcatgaatcacactcatcatgagcgatcttcttggttgttgaattggggttgctagttattttgagaatttttgtatctatgttcatcagggattttggcctgtagttttgtttttgatttgatttctgacacagattttgctgtatccttgtctggttttcacatcagggcaatgctggccttgtagaatgagtttagaggaataccctcctcttcaattttttttaaaagagtttgagtagaattggtatcagttctctaaatatttgctagaattcagcagtgaggccataatgtcctgggcttttctttgatgagagactttattaaggcttcaatttcattactcattattggtttgttagggtttctattcatggttcaatcttagtacgttgtatatgtttaataatttatccattttttctatgttttccaatttgttggtgtatagttgttcatattctctgattctttgtatttttgtggtctgttatatctctttttttttctttctgattgatttatttgggtttctcttttttagtctagggaaaggtttgttaattttgtctatcttcaaaaaatcaacttttcatttcattgatcaaatgtatttatgttttagtttcaatttcatttatgtctgttctgatatttatttctttctactaattttggatttggttcatccttgcttttttgagttccttgagatccatttttaggttgattatttgaagtcttttcccttttttgatgtaggtgtttattgctataaagttattgttatgctgtattctgtaggcttcggtatgttgtatatctattttcactagtttcatgaaatttttaaaattttcttagcttattcattgacccattggttgtaggagcatgttgatttccatgtgtttgtatagtttccaaggttcctcttgttgatttctggttttattccattgtgatcagaaaagatacttgatataatttttacttttttgaatttgctgagacttcttttgtgacttaagatatggtctgttctggagaatgtgccatgtgcaagtgaaaagaatgtgtactctgtagcagctgggtgaaatgttctataaatgtcaggcctacttggtctagtgtgtagcttaattccaatgtttctttattgattttctccctggataatctgttactgaaagtgaggtgttgaagtccctactattattatattggagcctatctctcccttgagatttattaatgtttgttttacatatttggatgctctggtgttgggtgcacagatatttataatttttaatatcctcttgatgaattgaccccttcatcattatatagtgaccttttgtcactttttacattccttgacttgtagtctgttttatctgatataagtatacctaatcctgttctctttgatttccacttgcatggaatatctttttccataaattcactttcaacttatgtatgtccctataggcaaggtgggttcttgtagcaccacatagttgggtctcgtctctttacccatttaacttctatacatcttttaattggagaatttggtccatttatattcagtgttattattgataagtaaggacttatgactgccattttgttgcttgttttctggttgttttgtaacgtctttcttcctttattcttttgctactgtatttctttgtggttaagttattttctctggtagaatgctttaattcactgccttctatttttagtgtattaattacagatttttgcattggggttaccatgaggcttacaaaacatatcttatagctactttgttttattattacttattattctgatacagggtctctgtcacccaggctggagtgcagtggtgagatcttggcttactgcagcctctaccttattgaactcaggcaatcctcctacctcagtctcctgagtagctgataccatagacacatgccaccatagccagctaagttttgtattttttgtagagatgaggttttgccatgttgcccagagtggttttgaactcctgagctcaagtgattagctagccttggcctcccaaagtgctgggattacaggcatgagccatggcgcgcagctgatattttacaaagatgacaacttaactttgatcacaaagaaaagactagaaacaaacaaaaaaacttaaataacccccacaaaaccctgccctttaactctatacccctacatcttgactttttgttgtctcggtttacatatttttatattgtctatctcttagcaggtcactgtagcaattattgtttttgataggtttgtcttttagatttcatactacagttataaatggattgcacaccacaattagagtattagagtatcctgggtatgtcttgtacttaatgttaccagtggtttttttcctcaaatattttctttatgcatgttagcatctttttctcttagattgaaggacttcatttgccatttattttaagataggcctggtggtagtgaattctcagcttttgtttgtcaaggaaagattttatgtcttcttcatgtttgaagaatagcttttctggtacattaatcttggatggcggttttatttcttttagcactttgaaaatgccatcccacatctacctggcctgtatagtttccattgaggagtctgttgccagaataattggagctctttgtatgttatttacttcttttctcttgctgcttttattttttattttattttattttttttgagactgagttttactcttgtcacccaggctggagtgcaatggtgctatctcggctcactgcaacctctgcctcccgggttcaagcgattctcctgcctcagcctcctgagtagctaggattacaggcacccactaccatgccccactaattactgtatttttagtggagacagggtttcaccatgttggccaggctgatctcgaactcctgacctcaggtgatccacctgccttggcctcccaaagtgctgggattataggcatgagccatggtgcccagccaacttttgtaatcctctttgtccttgacctttgagaatttgattattgtatgtcttggggtggtcttatttgggttgaatctgtttcatgttctctaatcttgtacctagatacttatatatttcttaagtttggaaagttttgagttatttctttggataagctttctaatttttgctctttctgaattccctcttgagcaccaatcattcttagatttgtccttttgaggtacttttctatattatttaggtgatcttcattcctttgtattcgtttcccttttttctcctctaactgtattttcaaatagcctgtctgagtttactaattccttccactgtctgatccattctgctgtcgagagtctctaataaatttttcagtttgacaagtatatttctcagttccaagatttttgtttgattttaaaaaattattttaatctctttgttaaatttctctgataaatttttgaattgcttttgtgtgttatccttgagttcactgagtttctttaaaactgctattttgaattcttggtgagagagctcacataccactgtcttgcctagggtaagtcattggttccttgctttgtctgtttggggaagtcatgtatattagtctgttctcacactgctatacagaaacacatgagactgagtaatttataaagaaaagaggtttacttagctcatggttctgcaggctgtacagaaagcatgacagcatctacttttttttcgccctcttggtcttgccttctttctgacatcacatggagtctgcagtccaggttttccttggccctagtaaatgactggagcactgccggacccaaatgtagaaggtcttacgggggatatcccaatagggtgggaagtctggctagaatttcgtgctcagggaacctgtggaacatacctcctatggtgtgtcgctgctgaccagcttcgctgatttggcgtctcctttggctgagttaaagaagagtgtttctagggttggggaaggaagtcccacctccccactttttctctggttgtctttgggaatatttctccctttaagtacttagggacagatctcttgccagggaatccaagatggtggggaaactggttatccacttcaatctcactttttccagtgtagaaactggcggtgaggtgggggaagttttccacatgcttggtgctaggcagatttgggagagggatgtcacggatttggaagtctgattcttacagcgtctgcttgaagttttttacttctttgttgccacgggcactgttccatcttcatatttgagttctgggatattgctggtgataatctcagcaccgtgtatttgttgtaggttttctgtggaggaaaaataaagccagcttccttatatgcagccattttggaaccaaactctcacacattccatggaacatttctagccagcaaggtacaatgactagcaaggaaacaaactttttttttccttcagtatttcagttgactcacaagaacatgaaatgtgacctatcttttcatgtggccaactttaaatgttaacttaatatcttagataaaaatagtttaaaatacacatccatttaagttaaaaagaataatttaaagttttattattctttgatagtttttcttttgatgctacacctagtgactaccatattttaaaacagacatgttctaattgctcttgaatcttcaactcgaaagaaactatggttttataaattagtgataacagtgagtgtcctctttaaaaaatatctgccatttctgacaaatgacaaatagctgatattattttttcttaaaaggaactctattcttttaacatacagtctctcttgtttaataaaactgaaagtaaagaatagatagaaatagtcctacctcagttcaggtcaggttttgttgccaacagagttatgaaaacttttagttttctacctgggtgtggtagctctcaccagtaataccagctacttgagagaactgcttgaggccaggagtttgagaccagcttgggtaacatagtgagaccctgtctcaaagaaaaaaaggaaagcttttagttttctgaccattttatttttgtttattttaatttttttatttcaatagggttttggagggacaggtggtgtttccttacatgaataagttctttagtggcgatttctgagattttggtgcacccatcatttgagcagtgtacactgtacacagtgtgtagtgttttatccctcaccagcccccacccttttccccgagtccccaaagtccaatgtatcgttcttatgcctttgcatttctgaccattttagattcagaattatggataagggattttcagcctatactgatcatgtctagaagttctgtttgtttctttaaaaaaaagttcatgtagcagcagataactaatacaaccagaaataaatgagatattgtttcctcaaattctttttttttttttttgagatggagtcttgctctgttgcccaggctggagtgtagtggtgcaatctcggctcactgcaacctctacctcctgggttcaagccattctcctgcctcagcctccggagtagctgggactacaggtgcccaccaccacgcccagcttactttttctatttttagtagagatggggtttcaccatattggccaggctggtcttgaactcctgaccttgtgatctgcccacctcaggctcccaaagtgttgggattacaggcgtgagccaccatgcccagtcacaaattcttgatactatattatgttattgttaccaggcaaaaggggctcactgctggatgtgctagaagctaatactatgacactggatttctaagaaaagaaaagctctttattataggttgaccaataaggagacaggaatctagctcaactgtatctccctgtgctggctttaagatagtaattttattagaaaaggtttgcgggtggattctgggattagcaggtggttggtggaaggaaaagggaggtctagaaagtcctcaaatgcacagttatctccattcctcttcatgggtcccacatgcaaattcaaagggagttagtatgaaacatgcagtggaaatcgggctgtgacattaacaagcttgttctgtgcaaactccatttggtcatgttggttccaactaattttggacactcttgttatctcacaaatggagggaatttcagcgtttcagcaagttatttattttcttatctgctatctggcaaactcaagatttctgttagttattggtttcctattctttggggcacaatttcagtttcaacttttcagcaagttgtttctttttttatatactatcctataaactcaagaattttatcattaaaaaaactctttggggcatgattttttcatcaaacttaaaaaaaaaatccccaatataacagagaatttccagcattttaacctgaaactgaagaccattactgaatgcagttttcaattgccaatctagaagtttactaattctgtgtattggatgtgcatatccttgtcaatcattttggcctaagggagtctttcttttaatcatcttttcaaataggaaaaagcaccaaattaagtgttttctcaaactttttcattatagttatttcatttctaacaaaattttagtgccacagttatattgtgtaactgcttatgtacagaggctctttggaggaccaccaaccattgtaataccaaagatttttgctacctccccttgaatcaattttgcccctgtggggatgatatcatccctgatatgaaggcatatattgagagaaataagacaaactattaaaccaaattttaatagatgacagtactttaaaagaaaattaatttaaaaatttagtcatttctgggataagataatgagcaatttcttttatttctcttattttctagtttccattatgtacttatatatacctctaggggatgttgtaaagattctataatattatgtatgtattctataatatgtatgtgaaagaaaaactgtatcttttcctttgctaactcatagatgtttaaatatattacattttaggtgttagatgatttatatatcttcagtgttaacacaaactgaagatattgctctaatattcatcacccaatgagaatttgtgatattctgcagatttggtaacattttcatggagatttaataaaaaacattgacatattcattctacagacatttattggctatgtaattcatgtcagaaactgattcgacacagcaaaatcacgtgaataagaaggtctatattgttgaaaagcttaccaatgcatcttcttcaaacacacatacaaacaactaaataaaaatgggataatgccctatacttatatggtcagggttttcaaggactatagaccatagactgatgagattcataaatacttttcagttgagacaagatttcagcagggtatgaaggttgaatagaaggtttttaagtgataaatgcctagcaagatttaggatcactcatttttaacaaaggaaaattgatactcttttttagtggccacaattttatcattctatacttttgtctttcttccatagtccttatgacaccatgaagtttacagtgtcttcatgctttccttatcctgatttcactgtcctctctcatatttttttatgtttaccaaggtatgtacaactgacaattttagagtcatctgcaaagaaaagataactattaggtactgggcttaacacctgggtgatgcaataagatgtataataaccccccatgacacgtgtttatgtaaccttcacatgtacccccaaacctaaaataaaagtaaaagaggaatcaaaaccttgaaataaaggtatgatgttcttgctgtggaaatttagaagccacagggtttaaggattgtagagacatcataagccctattactcccatcttcctactcaattacttcatgtaagctgtggcttactctgtctttgaaatgacatagcaagggcactatagatatggggaatctttcacttgcagagaggattttcaatctctgaaatggctgatttgcagagaagtggagtcgtttattctctagcacagggatttccagattttgaatgtatttaccagtaaaacaaagtaaagcaaagtaaaaacataagcttgctaaattttcttttgtcatttaagagcaccaagctttgagcgtgaatgtgctttggataaatgaattgatttcacttctcttgataaatgccaatatttctttagtgctctacattctacttttttccatctaattcatgattctgctgaagattttttcatccacagtattctcttcagtgcactctttacatctttgtttcttaaagtgtagatgggaaggttaaggctgggtgtgatgattgtgtaaaagagtgaagaacttcccttcatcttgggatatggtattctgtggcttcatgtatatataaatgattgttccataaaacagaattactactgtgaggtgggagccacatgtattaaggatcttttgcaaccttgttgctgacttgatcctcattacagcttgagtgataactccatatgagataagaattagtgatagaggtacgaaaagaaataccactccgaaagcaaagacaacaatctcaattacttttgaatagacacaagccatcttgatcaatgctggcatctcacagaaaaaattatccacttcccggtgcccacatcttggcaacttcaaagtcaaggagcaaacaattaaggcactggcaagaccactcaaccaggcagtggcaaagctgagggtgcattttaaggtgtagtgaagaggttgacagacagcagcataacgatcataggccatcacagccaacagaagacattctgtggctcccaagtcaaggacaaaaaagaattggagtacacaccctccataagtaatagatttttttgggccccattgatttgccagcatctgggggataatgctagttgtataacagaggtccaagaaagacaaattggataagaaaaaatacatgaaggtatggagctgggtgtctagataagatacaagaatgatggttgtatttcctaccagagtcacaatatagatgatgaagacaaccactgagatgatgtgctctaattggggtcgatcagaaaaccccagaaggatgaaatctgttccagaacttacactgcttgtttccattgttccttaagaaaagctagcaggcaatatcatggtaaccaaaaatagtgtcaggtttaggtagaactgaaaatctctgaagtttctcaagggtatccaaaactctcttatttgcatgctctctctcatttggaacatctcttttaacatttccctatggcccagtgctcacaacttgttcatatttaatccaaaattaataatatgctaaatccaatcaggctgaattgtaaatcattgaaaaaacttaatttgctatgtcattcattgttctatgtatttcaattaagtaataaaatcatgaagtcaattatgtgattttaagagaggcatatgtattgaggagttgttcctctttgaagctatgacataagcatcacttgatcatgataaatccttgcattattgaaggagttaagcttgaggtaaaaagttaaatgacatctttttttggaataaactccaccatttgatagcagaatcactttcaatatttacttgcaaatatctacatttcagccattataattataattatcctcaccaccaacttactcctcctccttatattttttttacccctcaacattgcaggcactgttgttattctatcaattttggtgttccctactacactgcctttttttgtgagtgtgttttttgttgccaggaaataattatctttcttattaatatttacttacatgtataaaggcctatatgttttttaaacagctttaatgactaatattacaccatctaaacagccttactgatttgttgcagttaaatattgaggtaattccagaactatttggccaccacgtacaacgatctgtgtccaatcctacttaccagccattcagcagaattagctgggcgctgggcaggtaattcaaacaaaaagcagttcattaaatagccagagttgttttaatctatggaatttaccaatccaacatgagtggatgttctgattgctttgaaatcctttaggtaaaaccatcaccccattgggctctaaaagaatacagatacagataaaaatgtcatcaatctcaccatttctgattattgtatcatatcactaagtagacaaaatatttaatgactgactgagttagtttttttttgttgttgttgtttgttttttttaaagatagattcttgctctgttggccggatgcagtggctcatgcctgtaatcccagcactatgggaggttgaggtgggcggatcacttgatgtcaggagtccagaccagcatggcctacgtggggaaaaattttgtattttctactaaaaatacaaaaattagctgggcggtgtggtgcgtgcctgtagtcccaactacttgggaggctaaggcaggacaattgcttgaacctgggggcggaggccacagtgagccgagatcgcaccgctgcactccagccggggcgacagaacgagactcttgtctcaaaaaaaccaaaccaaacaaaacaaaaatcttgctctgttgcctaggctggagtgcggtgacacagtgacagctcattgcagcctggacctccggtgctcaagtgatcctctcaactgagcctcctaagtagctgggaccacagatgcatgccactgtgtccaggtaatttttaaatgtttttgtagtgatgaggtctcaccatgttgttcaggctggtttggaactccttggctcaagcaatcctcctgcttcggcctgagccctggtgtcgagctaatggctgaattagtttaaacattttttctgctgataatttctgaccacgaaattcagacctaccatactttacatttatagtgtccttgaggccatggaatagaaacctcatttgtttctggtatatagtaaaacaaggggaagatagatcatttatatatgtcattgttataagtgtttcagttagaacagaataatgttataatcataaagaaggaaatgttatcaagtagtatgagatagaggtgtagtttttcacagcacaaaaatggaaatctaattaataagtgtccagtttttttatttttcgcaataggttgtcaactaaggaatgatagtgcttcattgcacagattctgaactcaaagtccctggcatcaaattccagcttcaccacttggaagctgtatccttgggcaattatttaacttgtttgtgtaggaggttctttatacatgaagaaaatataataaaatttccttcctcaaagggatgttgtgagggttaatatttataaaagcacttggaactgagcttggttcatctttaattctaaaaatgataacctatattcacctgtcattgttattctgtctaccccttagtccattaatttttcacactagtgattttaccgcaatgacctagaactaaactggaatgttttttaaaaaatttgtgtaactttaaaatttagaaacatttttatatacacaaaaatatgcagaatcacaatatgcacattgaactgaaaagcttcaggagcaggagatgacttgaggtctccaaatgctttgattaaaaaattcactcaaattcttttgactgctgttgggtttgtgttgggaattaaaaggtcatgaatttcaaagtggaaaaaaacctcagaagtcatgaatctagccttctgctctgcataggagatccttcaacagaatcgctacacagctgctactggcataacttcagtgacagggaagtcaattacacttgaagcagcctctctcctttagtcaatgctgcttatattgaactcaaagatgattccttgcccagccctggctgattttctttattctgaaaataacacagagtaagtcaatttaacatggcctcataaaaaccccagtattattatatgaacagtgcatggatacaacaaataaaaagtaaagcttggtgagtttcagtgtatattcttgtaactatcacctaaatcaataaataaaacattgatgattaccctaggagcttttctttgtgccttttaccaatgataactcttccctatcccctgaagtatccactatgctgctatttatagtaatcccctctttgcatgttagtaggttaattacccaaatgtgcacctctagacaatattgtatagtttggcttactaaaaattttttatataccttttaactctcttttaatattagaaactgttaccaaatatatgcttagatttctcttcccagacaaagcacattgttagctgttcctaccactacatgctcttttattaccatgctttttcttgttgctctccctggacacaccatgatttgtcaagtgctgcaaattagtgagtataaaagtaagcacgatactccacttatgcaacactactgaagagaatagtgaatgtctatgatctgcataattttctaaaatatacgttggttatttttagcaggtataagacattactggctctctttaaactttggatcacgtaaagccctaggcattcttattagaaatgctgccaagtcaggcatgacaatttatgtagtttaatgttgtgaactcaaatacaggacttttcatttaatactttttaacattttcatattgatttaagctttggatctcaaaccagatattttaatttcaatttaaaagtgaatgtgttatttgaaatgagacttacaacactccagctgaagaaatagatggcaaaaaagaggcatgctacattttaatcgaaactcagtttttcatttttcatagtatggacttcagagcccaataatcgcgcataacttaacattttgctttctccagtgaaatctgagacaaatgaaccaaacatatttcaacataatttatgatattgagagaaaattagaagcacaaaatttcaaaactgtctaaaattttataaaaagtaaaaatatatggatcttttattataaagcatgaggtatattgctgtagtcatacaaaattcaagatgaaaggacgaaataaaaataggtaagaccctagactggttcagaccgcctgtgatttttgttacaattgatctcagccatttccttactctgtggacttgagcaggctaattaacttctttagcctctgattcctcatctgtaaaatagctattctaatagcacctgctttgtaggatggctatgaggaggattacatgctatgctaaatatttagcatgatgcttggtgcatagagagcattcagtaacttcaaaatccactaactgctcttgttgaagtttaatcctcactcctgaggattaaatttatatttaatcctcaaaatgttagtattatttatatctcacatacctttcacatttttgctttcatgttagactgagtcttacgctatctaggatctgttttctacctggagtcatcctctgttagagatagcagagaatacttaccagaagctgaaaagattagaatatattttcatgaaggaagaattcagagctgtcatgttctcatgtagtccaaacatacccatgttcccattatgacgtttcttcatttaattaataaattagaaaaaaattcttgttggatgagttactaatgccctgaagaattggattaaccactggtcatactgacactacagtgccattcacacttaaatgcaacagctgaaataagatttaatagaagtctctatttaatgtggatattggaagtaaactaaatgtgggactggtgaaaatccttaattaggtttggttaaatatattttcggttggctatttgatgtctttttaatgtatactcttgttattcatatttacagctagatttttgcctaattaaacaaggagaacactgtgttggtcaatgtatattccaagaatcattaacatgtagcagggaagtatttatttacagctctaaaggctacctatgttgatatggtttagaccttgaggactgatgccccacagaggtgattaagtaaagctatgactgtggtcagaggcatatccaaataataatttcatgaaaagttctcttaacacattaggtttcggccaggcacagtggttcatgcctgtaatcccagcactttgggaggccaaagcgggtggatcacctgaggtcaggagttcaagaccagcctgaccaatgtggagaaaccccgtctctactaaaaacaaaaaattagccgggcatggtggtgcatgcctgtaatcccagctactcaggaggctgaggcaggagaatcacttgaacctgggagacgaaggttgcggtcagccgagattgcgccattgcactccggcctgtgaaacgagcgaaactcttgtctcaaaaaaaaaaaaaaaaaaaaaaaaaaagacgttgggtttcatcttttctttttctttttaagtttttaaatttaaaaatttggagattaattatatattatattaaatttacattgaaaaatgaatatatgatgtaaactatataaaaatgaacacatttacttgaaatttggtttattcaattggtaagatcaaaattggataaattaagttatgtaggtgttgtgtctataggacaaaatatttagttttaaaaaatttatgggataatcataattctaggtttatgaattattatcatcgttctattttcagcaaattaaaaatagtatgaacactctggagcttatccctcaatttatggtctggaaacttaccaccatccccagcttctggtaattaccattccactctctgcttctatgagtttaagtttttcagatcctcatttaaatgagatcatgtagtatttgcctttctgtaactggctcatttaacttaacatcatagcttctaggttcatccgtgttgttggaaatgacagggtttcctttttttgttacgagtgaatagtacaccacattttcttgatttattcattcattgatgaacacaaagtttgattccatatctttgctattgtgaataatgctgccataaacatgggagtgcagacatctctttaacatactgatttcaattccttggatatatacccagtggtgggatggctggatcatatggtagttctatttttaatttttggagtaacctccacactgttttatatagtggctgtattaatgtacattcccactaacggtgtgcaagggttcctttttttccctacattctcaccaagctgttatctttgctttttatgacaatagccattctaagagtatgaagtgatatctcactgtgcatttaatttacatctccccattgattagtgatgttgagcatttttcatatacatgttggccatttgtaggtcttcttttgagaaatgtgtatttgggtcttttgcccatttttattttcatttttaaaatttttaaattattttattttattttttatttttatttttgagatggagtctctctctgtctcccaggctggagtgcagtgacacaatctcggctcactgcagcttccacctcccaggttcaagtgattcttgtgcctcagcctcctgagtagctgagactagaggcacgtaccaccatgcctagctaatttttctatttttagtagagacggggtttcaccatgttggccaggctggtctcgaactcttgacctcaagtgatccacccatcttggcctcccaaaattctgagattagagatgtgaaccaacacagccagctccattttaaaatagaattatgttttcttgtttgagcttcttatatattttagatattagccccttattagatacatcatttgcaaatattttctcccactccataggttgtcttttcattattttatttgtttccctgactgtacaggagctctttaatttgatataatctcatttatttatatttgcttttgttgactgtgcttttgaggtcatatccaaaaaatcattgaccagatcaatgtcatggagcatttctatgatttcttttagtagtttaatagtcttatgtttaagtctttaatgcattttgagttgatttttgtatatggtttgaggtatgcatgtaatttcgttcttcaacatgtggatattcagtttttcaacaccgtttattgaagagactgccctgtccccattgtgtgttcttggcacctttgttgaaaatcaattgattgtaaatgtatggattgatttttacgctattttgttccattggtttttgtgtctgtttttatgccagtatcctgttgttttgatgactataggttcacagtagattttgaagccaggtattatgatgcctcccgtttttttttgtttgtttgttttttgattcaaggttactttggctatggatttttgtggatccagacaaattttagaatcgttttttctatttctctacaaaatgacattggtacttggatagagattgcattgaatctttatttggggtagtataggtattttaaaaatactaattttcccaatccatgaacatgaggtatttttcaatttttgtgtcttttgtaattttaaatatcagtgttttatagttttcaagtgtacaaatctttcacctcctcggttaaatttgcacctagttattttaattaatttattttttaattatgattgtttacttaatttcttctcagatgattgttagtgcatagaaacactactgatttttgtatattgattttgtaacctgtaactttactgaatttgtttatttgaatagctttttttgttgttggagttcttagggttttccaaataaaggatcatgtcatcagaagagacagtttcacttcttcatttccaatttgtatgcctttttttctttttcttgcctaactgctctggctaggacattcagtactatgttgaacagaagtggtgagcgtgggcatctttatcttgttctggatcttagagggaaagctttcaactttttatcattatgatattagctgtgggcttgtaatatatggctcttattgtgttggcaaaaatagattctcagaatataatctccagattttgtaatccactgatacaattacatactgattacctactctgtaatatggaatttaaaaaattccatgtgtgattttctaactctatcataggtcggtaacctctatacatctggaaaggctagatgtggcaaatgtttccttgtaaaagttttgggggaagctgagagcagctttctcacattatacacgcaggtctcctataaacgccggtacatcctcccaaagcgtgatgggaatctccaaatcgctaaatgtgtcctgttactccgtttctcttttcccacatcaacgtctggtagaaggaaggccaactgccccatggtcgctaccattccacccgtcctcatccgggacttcgctgaccttccggccgttaaggctgttgtctgttgtcatcaggaccaggtaggtctcacccaattgggacagagaggtcccccgaggacagcatctgcgcggcgccgtggcctaaagaggaggccaggcctctccctaactccgccttcgcgggccctgcaccccagcagcctctgcgtgtttcttcccgcccggcacacccgcggccatccaaaggtgctgtgtgccggcggccaccaggtcaccgaggtggggtggggaagacaggttcgccgctgcttcaggcctgggatctctgctggaactctctacattttttaatcaatttaaaatttataataatgtatgttttttaggtattgtttttactgacaaattttatttctagatctttcatcagttttctcacgctggtcaacaaataggccttcatcacacactaatttgtaatgtcattcttttcatatttactgttgtaatgtaaaacacactagggtctgttttgaggcaatgttgtttcaatcatatgcaaatcaaactctttttcttttttgagacagagcctcactctgtcacccggactggaatgcagtggcacaatctctgttcactgcagcctcggcctcccaggctcacgtaatcctcccactacagcctcccgagtagcggggactacaggcacaggccaccacgcccggctatttgtttgttttttgtggagacaggggtgtctcactctgttgcccaggctggtctccaactcctgagttcaagctatcctcctgcctaggcctcccaaaatgttgggattacaggcaggagccactgctcttgaccccaaatcaaacccttagtaatatttgatagtatttcagtgctggccagagcaaatccttgcttattattcgtttatgaaaatggcttgactcttctaagctgtaatttgaccaaataaatcttgaaataaatttgttacaatccaaacacaatgcagacaattatttgaaatgtctgcatttaaatttatatttaaaagttattttttgaagaatgtggcatgtctcattttatttgtttttccctttttcttggtaaagattaataataccttaaaaatgttcaacatatgttaagttcatctttattgatatcattttatttaattgctcattgcttattgttgttaggagagctatatatgtattttttaaattaaatttttttttttaacttttattttaggtttaggggtacatatgcaggtttgttacttgagtaaattgtgtgttgctgaggtttggtgttcaaatcattttgtcacccagatagtgagcatagtacccaataagtagtttttcaatcctcaccctccttcctcctgccaccctcaggtaggcccaggtgtctgttgttcccctctttgtgtctgtgtgtactcaatgtttagctcatacttataagtgagaacatgtggtatttggttttctgtttttgcattaattcacttaggataatggcctccagctgccatccatgctgttgcaagggacatgatttcattctttttatggttgcatagtattctgtggtgtatatatgtcacattttctttatccagtccaccactgatgggcatctagattgattctatgtctttgctactgtgaatagtgctgtgatgaacatgcgagtgaatgtgtctttttggtagaacaatttttatttctttgggtatatacccagtaatgggattgttaggtcaaatggtagttctgagttctttgagaaatctctaaactgttttccactgtggctaaactaattgaaattcccaccagccgtgtgtaagtattccattttctctgcaacctcactaacatctgttattttttgactttttaataatgtccattctgactggtgtgagatggtatttcattgtggttttgatttgcctttccctaacgattagtgatactgagcatgttttcatatgcttgttggacatgtgtatgtcttcttttgtgaagtgttggttcatgtctttgctcatttttaaatggggttgtttttgcttgttgatttgtttaaatttcttatagattctggatattagacctttgttggatgcttaatttgcaaatattttctcctattttgtaggttgtctgtttaatctgttggtagtttcttttgctgtgcagaagattttaaatatttattctgtatatttctttttcacggagtctatagggatttctaataacataatttttttgtgttaaaaatggagtggattctgttatcttaaaataatgatagttttctttcttcttattttttgggggatatacctgtatttttcagctaatgtaaaacaacagagtagaaactctagttgatatttgctcttaagcattttagttcagagggactaaaagcaaggtgcaacaaattaagaagtaatgaacagtgtctaatgagaaaaatagagtgtgttttgaactagcctaacccaatttggtcatgctcagcaacagggtcatttttggtagttaatcatagtggctgaaaaaggtgaagtgggcgtatggttagcatttaccaccacaatcctatgtcccagttatgatgaaaatgactctgatcaaattctgccatgaatatagagattagttaaccagacattagcataagacagtttatgtcatcttctctgtaaatttaataaatcctcagctctctgccctttaaaatactccaaagtaccttgtagaaaggtgtatttgaagaagataagacaacagaggtagggttttactttcatgtcagcattgagaaagtggaacttatccatagtaggacacaggcccatttagggaacaagtcttgggcactacccctaaagtttaggctacacatcttgctaggttcttatgcccttcatagaagaatagggaatgtttctaaaatatgttagatgaccctcatatatttggtaccactaatttcaggatgataactgatttaaacctcaattattatgtgagttggctaggcatcaaatgttgaccaagaggtagataactgaaggtcctgtggtagctgccttggagggcagcctttctggctaaatgctagttgacctccccatctaatagtgtacatttactgattagagccactcatgtccataaaatgttatatatatatatattttttttttttttttgagacggagtcttgctgtctcccaggctggagtgcagtgtcatgatcttggctcactgggctcactgcaagctctgtctcccgggttcacgccattctcctgcctcagcctcccgagtagctgggactacaggtgcccgcgaccacgcccagctaattttttgtatttttggtagagacggggtttcatcatgttagctgtgatggtctcgatctcctgacctcgtgatccaccgcctcggcctcccaaagagctgggattacaggcgtgagcctctgtgcccggcccatagaatgtaatatttgaatgaataaatgcacttatatcaatagcctgacaaagtgttttaaagtatactacagttaccatgacaaagtgtttctctgaagaaacttgtctatgaagaataatgagattggtaagaaaacataaataaaaagaactaccaaggaacatttccatccaactgattttaaagagaataaattgacctggagttaattacctagtagaattaatttctacacagtgatttggaatttgggagtacaattagtgaaaacaggtactggaattgctccagtgttgggaatggacccacatattcataaatgggtacttattggtactagaaaattttctacacaattactctacattaaatattactccaggttttcaggacatggaagtagcttctttttaaaaaatccttttcatgttacttctccacctagatagtttcaaaaagtgtattatttttcaatttcaaaattttattcattgaaacataaacttggtcagttctattcaagacatcaatataaagagaaatcactgaattgtagaaaggtttgtataaattaaattgtaaaagtgtgagctaaaaatatgcattattaatacagaaagcttcttagtaataataccaaatatgtgctccttataatcacatggatcaaaattgtatactctttagttaagggatgtaatggggaaaaatagaagattggaattgttttaattgcatctgtgttctgaggaatggagcagcagcagaagaagaaaaggtgttcttttacttaaaacaacaaattctattttctaatgcaaggtgagtgtatctttaccccttattctagtgtttatagaagatagagccagacaaatatttctctctaagtgatagtgacattattccttcacagacactacagttgaaagaattggaggtcctaggtcagagacaaagacagattggaatagaagttgggaccgaaagtaaataagatcttccaaaacatggagcaagggggacctaaaaaagcagacatccagagagcaaagctctgtggtagggattgctaaggaattttaagaagtcaaatattcattaggcaatgttttcctttttatcctgcagtataatcctcctttattattcccagttctttatgaaaatcccactaactgcattccccacttgttagtggtactttagagaataaaagaaaataggcttggttcactggcaagaggacaagaaatagtctttaagtggagaagaagctgtttcgtacagtagaaattggtaaggacagtggccacagggactcaactgtgagaggaggttaaaaatttatcaggagcagtattttaaacaaaaatcctcaaaaataatagaatccttctcccatagaaaataattttcagaaatacaatggagagtgtcagaatttcttcagaaagtagaaagaattttaaaatttaacttatgcaggttgggcacggtggctcacgcctgtaatcccagcactttgggaggccgaggtgggtggattacctgaggtcaggagttcgagaccagcctggccaatatggtgaaaccctgtctctactaaaaatacaaaagttagccggatgtggtggcacacgcctgtagtcccagctactcgggaggctgaggcaggaggatggcatgaacccgggaggtggaggttgcagtgagctgagattgtgccactgcactccagcctgggcgacagagacagactccatctcaaaaaaaaaattaacttatgtattaatacaaaaaccaatatcagaaatgccagagacctggatgaactgatatctataaaagtgataaaatgaatcaatgtacttcagtaagttgggtacatatttagacttataaattatcagcatctatacccaggtattgcttgaaaaatgttaccaattaataattagcttaatttttacagcatgtttgaaaatttgatatgccatatcatttttatgcaacatacttcaataatacatgtcagtaaatttatttaagatataaatattcattgtaaagtaggtaaatgtatgtacttgcaaagatacccaaacacatcaattaaaataatgggattagaattggataataagtgcatatatatgtatttgacctctagaggttcctgtacttcaaaattcatcactatatgacaattgagtatcatagcatcttctgcttgaatccatttataagtttttgtttaagaaatgagagaaaattaataattgttatgaatataaacagatacagtaaaaatggcatttcattttctctagatattcgtgattctctgaatttgaataatgtattttttagattatagtcttctaaagaagagaaatattgaaagaattagctatttacttgcactgaggggagtcattatgtgcattttctactatggttttcttagtccaccactcctcaagttatgatggttgactcagaagggttgcttttatctttaatcataaatcattatgaatttccttgtctgaactagtcaacatctaccatgttgtggttaattggtaccaatcagagttgaacttcttgtggaagaatctggagatgtccatatgaaaggaaaataggcaataaactagattgtattatattgcatttttccaacactaggcatatgtggttttgaaaattacctatttactgagtgttttgtgagtggcagaaacattttcctgccctggccaagggctaaccttagaaaaagataaatgtgatgggtataaaatctaagagagctgacttagtttcaggatattgttaagcccgttgagactggtgctccacaacagtaattaagcataattatgatgcaggtcaaggtaagacatttccgaaattttctaggacatgtttttgaaggcttgggatattctgcttagctcatatttgtgtatgttttttttagttaaaaatgataacaagatgatttttgctctgtttacaaacatttgcatgaacactgaaaaattcatccaaatcgttaaaaatattcaatgcctactaagagtcatggaaccctattatatgatggtgaatcgagaaagaactatacaaaattatgctttcaagaaacttataattacattggctagaggcttatcagttctataaataatatttacaaaacaatgcaattctaaccttcatagagatttgtatggcttgttaagagaaccatagtctaagacaatgggcttcaacgggggggcacactctgggatgcagagacttttgtagggttataaagttagttttaaggaaataacttccagatcctccttgttcctttgttttcttcgctaacattttcttgaggaaatgccaggttgaggagttagacaggttctctttccagccttcactttcaaagatcccttctcctccttcacaaaagaaaggcataattaccatctctcctgatcttactgtaacatattatccacattgtgaaaaccagtggtacaccaaagaaagggacaactcaaaatgctagtggtgtgctgctcatcattaaagatgacatgatggaagagaaaatatatatttttagattctagcagtgtgtctttctagatctatctagattggctactattattaaataatgggcacttttagagaaaggtatcagatcatggcaaaaataaaagtttaattaaaaagtaatcacattgtcccataaaagctaaatattatattatgataaatagaaataaaaagatttattctgttatgcaattccactacatataaacattaccacatttctaaaaattcacgtaaatccgccagttccacagatgtatgtcaaaagcctaactggtttcaaactagtcatattatctttccattaagttgagacaatcatggaataaacatttaacgaatgaaagagaaattgataagactgtgtcattacctttaaaaccctttaatttgtggctttatattacgatagagtagtaatagacttaaatagcagagaccctttactcaagatatcgatttgaaatttcattgaaaaaagagtgaattgttttaaatggggcttatgacaattactgtcttataaactgcactgtttgcatcaaacacaaataaatatttgggtggcattacaaaagattgggtgtacaaaatcattattgtgtatatgtatattttttctcaagctccaatagaatgaacattatgggtatattatttaatatacacaccataatgtatatgaaaccatttgctcaggtctatactttggaagaggcaaggattaacattgaaaatacaaaactagataaccaaaacagtttctatgtggttttagaataaattaaatgcattcaaatttatgtttacatcccatttgtgttttatttcaagcaaaaataaaatttctaatgatctgttttctctgatgatataccaatgatcagggacataaaggagctaagtagaatggttgtaattttgtttgcatctacaaaatgtttgtatataataattatatttatggatctccatgacctaggaattacttgcatttgtaaaaattaaagaaaattagaaaacatatttaattgccttattcactctagtctttatctatgacttgcaattcctctttatttttgtagatttgtggtgaaatctcatcagtttcttcagggcatccttcatgtccttatttcttaaggtgtaaatgagcgggttgagacttggagtgatgacggtgtaaaagagggtgaggaacttgccctggtctttggaagccctgttacctggttgcaggtacatgtagataatagttccatagaacatagacactacagtaagatgagatccacaggtattcattgcttttcgctggcttgcttttgacttcgttctcagcacagctttggcaatgtagccataggatataagaataaggatgagaggtgtgaggacaattataatgcctaaagcgaaaacagacatttcaactgttgtggtgtctacacaagctatcttgaccagagctggcaactcacacaagaaatgatccagaatgttgtttccacatgtgggcaaattcagagtgagtgtacataatactacagaattggccaaactaatactccagatcatgataatcatctttagacatagatgtgggttcatgactacaaaataatgcaagggcttacatatagctgtaaaacgatcataggacataacagccaggagaaggcactcaactgagcccaaccacatgtaaacatagagttggatgatacaacccacatagctgatggtcttatcaggtccccacaagttgaccagcatctgagggatgatgctggttgtgaaacatagatctaggaaagataaatttctgaggaaaaagtacattggtgtatgaagctgggaatccaggagagatgcaagaatgatggctgtgttacccaccaatgtaattaagtagaagatggcgacaactcctgacaggatcatctccatttttggatggttagagaagccaagcagaataaaaccatgtaaagaactataattgctttggtccatagtccttcaatgtctaaatcctagagtgagaaaaggaggaggaggaggtagatgatgatacaaggataaggagaaggaagaagaaggaagaagaggtagaggaggagaaggaggagggagaggaagaagaaaaggaaaagaggaagaaacaatttgtcaacatgaactatctaaataatttgataaaattagaactaaacaaagagagataatttatgttactaattgaaaaaatttaatggataaaagtaaaaattacagccaagaaatctgctatttgtcatagattcttttatggcaatgagtttaatattagattttttaaaaaaaatccaggtgaccttggggagttcacttttaaacttgaggtctgaattatctaacgtgtagatttgaaagtttgaaatagatgctggttctaaaatgaccctatgattctttataagctagttagcttgataaaatgaacatattcttttatttgatcagtaaattcacctataaaatttaagtactgggctaatggtaggatgaggaaaagatgtgataacctggaggatgaacctggggacatcatgctaactgaagtaagctgaaagacaaatattgcatgatttcatttatatatggaatccaaaaaagttgaactcatagaggtagagagtgggggcaggagatggatgggaaaaggggagatgttgatcaagggtactaagtttcagttagaaaaaaggaaccagttttagtgatctcacagaatggtgactacaataaacaataatgcattgtttatttcaaaattactaagagtagattttaagtgttttcaccacaaaaaataagtatgttaggtgatgggtttgttaattagcctgatttaatcattacacattataaacatatattaaaacattatattgcaccccataaacatatacaattgttgcttaattaaaaataaaccttaaaaaagagtgaggaaagattgttcttcttttttcatatcttagtgactaagcacctttgatctcctagtttgttatgtaggacatctggtgtttacccttggacgccttgtctctctcattcttaacgccttatcaccaaaactggtaaatttggatgcaaatatatatgctaattatcctatcactttaaaaaatccctaccaccacaaccctaattcaaatcactatgatttcttttctggattctggcaatagtcttgcatccagtccttgcatccagtcttatgcctttacattgttacaacatttgatgaaatcatgtcatccatctccttaaaacttgtcagccactttacactacatttaagaaatactatattgtatacttaaaattttgctaggagggtagatcttatgttaagtgttctcatcacacgcacacacatacacaacacaataaagaaggtgggaggaaactgttggaggtgatggatgtatatatgggatagattgtgttgatggtttcacaggtatatactcaccttcaaactcatcaagttgtatacattaaatctgtactgcttttgtatgtcagtcatacttcaataaagtggtcaaaaagctaatataaaacatttggttaaaaaataacagccattagccaggtgtggtggcgtactcctatagtcccagctactcaggaggctgaggcgggaggatcacttgagcccaggagtttgaggttgcggtgagctatgattgcaccactgcactccaccctgggtgctggagcaagatcctgtctcaaaaacaaacaaaacccagataaatatcaaactggtgcttcttctctctctttatatagatgtagtacaaaaagttgtgctttttttgtttgttatgccatttcaaatatgtttttttgaatgttattaagaaattacttccaactgtggccatgattcaaaagtggatacatttgtgagactaaccggagatggtggttgaaatagccgttttgagaaaatcattttgtgatttctttagcattagcttttcaaaaattatgatttgattctgagttttgccattaatcaaattggatagaaagaaaaataattctctgaaagatatttcaagctgtcacaccccattaaagttccataatgtctgagcaggggcatcaataattaatgcttatttattttaacagactcgttgatgtgtataattgtgcctaacttctgaataaaatagggcttcagttaaaattatataaaaacctgaaaattcttttaaaattaaaatcaatattatgctgttaatttcttaactatttcattattactacagtccataaagattaactcaggaaagaataaaaatcctccttctgcctattaaaaagtgacatagaaaaatcttcaaataaattttcatgcacagtatgagatttagaaatggatacataaaatctgagtcctttatggctccacaaccttcaagaataaaatattttgctgacaagtttcacaaatggcattaaaaaacaaaacaaaacaaaattaaaaacaagtatctgaattcttcattttcaatttaatctatctttctcgcttttgtttctgctggatcaatatttattctcagacttctgaaataaaaccagcccatacagatctaagttctttttcttctactttctacaaattgttttaccaatccaggcatactgtttctccaagagattaaggatgaacattactgtgatccagagggagttcctttgccattctacttctcgacttttgtagaatccacactatggaaaatagatcccggttaagcatttttttctccagggctgtaaatttctcatgatttccctgcagtgccacggagaattctgcttttcccaaagtgtgttagggtagagattctcaacaggactcctccttctcgaatatatgacttcaagtaagaggatgaaacctgtcacaaattcttacttcttgttctgagtttaaatcaacctgcaagtaggtcttgaccatagagaaacattaggaaaagcaaccggataattcagaatcagaattgaacaaaatttcccagtattacctgaagactcagataatcaaaaagattatctaaaccattgggactgcatccaattaactttactagagtacagtgtcatagaaaatgccagcctagaattagaccataccctaatatttcactagggcaggtttagtagatgtaaaagttatttaatatgaaggaaaactataggacaaagaaataagaaaatgtattttcatatttttttggttgtgaatgtattataatataaaatttactcttaaataatgtagatttccaacactacaattatacttagctacagaaaaatcttaccattcaaagcacaaatattgattgtggaactaaacttgctctgagcagatatcatttaaatgaggtacctctagtggttatctctgatacccatggtcagaacagttgtatttgaaagagatgtttaatccccaaagctctaaacagtaagaccagaatcataagatttacattttttctcagttgttttggtgaccatgagggatgattcaaatacttcattgtctacgacaattagttttgttattgtctcagaggtcactatttacacattaaattctagagtaagtatatactatgaaaatttttgtgagttggcttataatcataggttttaacagcttccttaaattaaaattacatatcagtaataattggttttaataaaatacataagcacgaattggctgcctcatgatacatgttcaaatgtggatgacattactgatcaataaaataattttaactatctgcttctgtacgataatcaatatattttacacttgagatatagtatagtgtaatggttagatggatagattgtggagccagactttctgggctgaaatcctggtggctacagttaccagatgtgtgaacttgggaaaattacttaaccttcattgcctccgatttcttatctataataggggatattataatacataatttaaagggcgaatgtaaggattcaataagtttaacatatgtaaatactacagtactggttggcacacagcatccaaataagtattaactgttacaatttcaatcagttcagggtgtctgtgtgctgcagaaatatttggggaaagtttatgctgatatttgataaaacatctggaaaatactctccttataagcacttcctttaggattttatatataatacacacatatatgaaatatatatactatatacatagtatatacatatgtatgtgtatgtattctttataaatgctataataatgatgataaaaagaaacataacatctactaatggtacatttttgtctatcaagattctaaacatctgaatacttgaaactgttcactttgactggagatctcagtttcacttatgtatttttctcttcccctttagtcaaattttctacagttctcctttttcttttaaaaaccactttaaagttataattgaatttcacaatttcaattcaaccatagcaaatattcaattttcatttgaaaaacaaaaatgtatataaattgtcatgcccacccatgtttctggtttaaatacattcctacacagtgacttttctagtcccttgctccttattctgtgattaaaatccatgggtttgttactctggagaaattatagagaaatcctttggatttttgaattaatttttaaaaaggttttcatttgttatcaaaaaatggatatacccagcttgtaaagcagatgcccttgccttaaactttaatataagacctttccatacccctttgaataaatcaagacatgttttcctgtttcctttttatttaacaattttttcccttgcttactttagcccttaacttatggaaaccatttaaagtgaagttattagcagtgcttccacaactggccgcatatcagagtaactgtattggctggcatatgtagaaattttagaaatacagtgtcctgagattcctatgcccttgccaaaggctcaattcttttctgtttatactgtgtccctagatagaatcttagagttttaaggatttgaatcccatctacatattgatggctttcaagtgtctatttccagtcttctacattgagcatggaataggtagttccaactgcctaatttcatgcacaaaattatgagtctaaacatagctaaaatagatctcttgattgcactgaatctgctctcattccagtcttcctcattgtagtaaatgatataaacatgtacctatttctggccagaaaccagtaattaaggagttatccttaattactagcctgccctcatcttgaaaatctgaatgattccaagctcgacttctctccatttccagaatgactaacaaactgggccaccctatttttcctggattacccaatggattactatcttgtttctctgctttaattcattcccctttcaatctattctccatatggcggccaaaagcgttctttaaaaaaaccacacgttggctgggcgcggtggctcacgcctgtaatcccagcactttgggaggccgaggcgggcagatcacctgaggtcaggagttcgagaccagcctgataaacatggagaaaccccgtctaacaatacaaaatcaacaatacaacaatacaaaattagccgggtatggtggcgcatgcctggaatcccagctactctggaggctgagacaggagaatcgcttgaacccgggagacagaggttgctgtgagccgagatcgcaccattgcactccagcctgggcgacagagcgagactgtgtctcgaaaaaacaaaaaacaaaacccaagaaaaccaaaaccacaaatcaagtatttccatttgccaatttgaaatctttttagacttcctatgcacttaactataaaattcagactccttaccaagaactaccagatgcaccttgcctggctccttttcatccctccctccttctcccattcgtctcatgcctttgtcattccagggttgcaggtgttaaagtgtctttgcattgaatttcattggcctggcagattctgtccccaaattgaactccttgtttgtaatcgtttttcagatataatctattcaacgagatcttccttgactacttaatctaaattaaaatccctcctccccagctaatctctatcacatttccatgtgtttttcgtagcacttatcactctaaattttgttttttttaaatgtatctccccacaattaaaacctaagatccaaacgaatatggatctgatcccccttttttgccacgtaactgaatgaatcaattcaacaaatttgattagcaatagaaatatagcaaacaactaaatagacaaaacagtaaagtccctgacttaatggagcttacttttatttgtgaaaacaagctcatcagccaaattatatatagtgttttatttgttcattgctttttttttctttctttttttatataacatcccaccaaatagaaacattctctctttaggaatagtgttccgtgtagatgttgatttcttactatgcaattttacggacattgtcttccaatatttccgtagactaattggtcaggacctgatagccctgtgataatgctgcactcagcattccttgatgatgctatattagcttccagtggctgtttggtgcctggaagggagtctagcatgtaacagggatcaataattgtttgttgactataaagcagttagaacaatatctgatgtgtatattaaatatcccattcagtcaaggttatctagggtgatatattcaagaaatataatgctaactcatttatgtggtgatggagatccgtgtttaatgatattgatcatcaaatagcctggataaagagtatgttcccagaagaaagagatttctgagactgcttttatgttatcctttacatttctattttttgactcttttttttttggcttttggcttttgggtctcactctgtcacccaggctgaagtatagtggtgtgatcatggctcattttggcctcaaactcttgggctcaagcaatcctcccatttcagtctttccagtcactgggattaatggtgtgtgccacaaaacttggctctgtttgatttttttttttttggtggaccatatattttaccaaaatatctgaaatattgtaaatgatattttttgaaatatcggaaaatatttttggtatattttggggaaaaatacaaaaccaaaacaatctacctatttaccttctcgtgaacttatgaaatcaaatattttaagccttattttccccaaaccgtatatgattctctcaatagttgcagaaaaatcttctgataaaatccaacacctcttcatgttaaaaccctcaataaactaggtatccaaagaacatacttcaaaataataaaagccatttatttcagtcccacagccaacatcataccaaataggtaaaagctggaagcattccctttaagaactggaataagacaagaattctgacactactcttattcaacgtagtactgaaaatcctagccaaataaatcaggcaagagagagaaataaaaagcatccagataggaaaagaggagtcaaattatgctatgattctatgactagaaaaccccaaagactctgccaaaaggcttctagacctgataaaacaacttaagtcaagtttgaagatacaaaatcaatgtaaaaaatcaatagcatttctatacaccaataatgttcaagctgagagccaaatcaagaatgtaattccctttaaaatacacacacacacacacacacacacacacacacacacacacaaaatctaggaatacttctaaccaaggaagtgaaagatttccacaaaaagaactacaaagcactgctgaaagaaatcatagatgacacaaacaaatggaaaaaccttccatgcttatggattggaagaatcaacaacataaacaaaatgtctaaattttaccgcctaaagcaatctacagattcaacactattcctattaaattaccaacgtcattttacacagaactagaaaaaatgattctaaaattacacggaaccaaaaaagagcccaaatagccataacaatcctaagcaaaaagagcaaaactggaagcatcacattactggacttcaaactatgctacaagtctacagtaatcaaaacagcaaggtactggcacaaaaataggcacctagaccaatggaacagaataaagaacccagaaataaagcagcatacctacaaccaactgatcttgaacaaagtcgacaaaaataagtaatgcagaaaggactccctattccataaatggtcctaggaaaactggctaactatattcagaaggatgaaacttaacccttaccaagcaccatatacaaaaattaattcaagaaagattaaagacttaaatgtaaagccccaaactataaaaatcctggggaaaaaactcagaaatacccttttggacattggccttggcaaagaacttatgaccaagtcctcaaaagcaattgcaacacacaaaaaattgacaaatgggacttaattaaaccaaagagcttctgcacagcaaaagtacctatcaacagaataaacagacatcttacagaatgggagaaaatatttgcaaactatgcatctgacaaaggactaatatccagaatctataaggaacctaaacaaatcaacaagagaaaaacaaataaccccattaaagaatgggcaaagaacatgaatggacaattctcaaaagaagacataaaagcagctaacaaacatataaaaaatgctcgaacactaatcattagagaaatgccactcaaaaccacaatgagataccatcttgcactagtctgaatggctattactaaaaagtaaaataatgacagatattgatgaggctgcagagaaaatggaacacttttatactgctggtgggaatgtagattagttcagccactatggaaagtagtttgggaatttctcaaagaactgaaaatagaattaccattcaacctagcaattccatcactgggtatgtgcctcccacccaaataaattgttctacccaaaagacacatgcattcacatgttcattgcagcactattcacaattgcaaagacatggaatcaagctaggtgcccattaatggtggattggataaagaaaatgtggtacatatacaacatggaatgctacacagccataaaagagaacgaaataatgtcctttgaagcaatatggatgcagctggaggccattatccttagcaaattaatgcagaaatagaaaaccgaacaccacatcttctcacttgatttaaaatttaaggagataaatcctgggtacatacagacataaagatggaaacagtagacactagggattccaaaaggaaggagaggaggagaggagcaaggactgaaaaatttcctattgtatactatattcactgtctgggtgacaggattaatataagcccaaacctcagcatcacacaatatacccttgtaataaacctgcccatgtatccccctgaatctaaactaaaaatagaaatttaaaaaacccctttttcatagtaatcataaaatatacacttatgcaatttatgaaaataatatagttttacctctgttcttttcactgcagctttgtgaaggtataattaacaagtaaaaattgcatacacttactatgtgtatgatgttttgacatatgtatatattgtgaagtgattaccacaaaccagctaattaacctatccatcagctgacatattttttcttgttttgtggtgagaatatttaagatctactctcttaacaaatttcaaatattaaatactgtattgttaactatattcaccatgctgcatattaaatccccagaacttgttcgccttataactgaaagcttgtaccttctgaccaacatctccctattttcccctcccccagcttttggaaaccaccattctaattctattctctgtttctgtgaattcagctttttaagatttcatgtataagtgagttcatatcgtatttgtctttctctgattcatgtattttactaagcataatgccaacaaggttgatccatgttgttgcaagtggcagaatttccttctttttgatggatgcttggtttgtttccaagtgttggctaatgtgaatgatgctacattgaacacaagagtgcatatatctctttgacatactattttcgtttcctttgggtatatacccagcagtgggattgctggataagatggtagctctagttttgatttttgaggaacctccatactgttttctaaaatggctgttccaatttacattcccaccagtagtgcataaggattccctttctttctgaatccttgccaatacttgttatctcgtctcgataatagccatcctaacatgttggctgatctcattggggttttaattttcatttctctcatgaatagtgctgttgagcattatcattatttcacgtatctgttggccatatgtatgtcttctattgagaaatgtcagctcaggtcctttggccgtttaaaaatcaatttattgtattatttttgctatggagttgtttgaattccttgtattttttggatattaactccttatcagatttgtgagttacgtaagataatggttcaattttattattttgcatatagatactaagttttcccagcaccatttattgaatcaagtatcctttctcctgtatattcttgacacatttgtcaaatattagttagttgaccatatatgtgaggatttatttttggggacttgattctgttccattggtttgtgtgtctgcttttatgccagtatcatacagttttgattcttatggttctgtaatatggtttcaagtcaggaaatgtgatgcctcagcttttctgttgttgttgttcaagttgttttggctatttatgtttttttgtggttccatacatattttagaatttttcctccaatgctgtgaaaaatatcattagagttttgataagaattgcattgaatctgtcaattactttgggtattatggacattttagtagtattaattcttctattccatgagcatgaaatattttaaacatttatttgtattttcttcaatttatttcatcaatattttatagttttaagtgtaaagattaatcacttccagggttaaatttatttctaaatattttattcattttgatgatactgtaaatggcatttgtttttccagataattcagtgttactgtacagaaacacaattattttatggcacatgtatacatatgtaactaacctgcacaatgtgcacatgtaccctaaaacttaaagtataataaaaaaaaaagaaacaattattttttccattgacaaataaaaattgtatttctttacagtatacaatcatggtgttttgatatatgaatacattgtggaatggctaagttaagctatttaacatatttattacctccttttttgtgatgagaatatttaaaatataatattttggcaatttttaagaatacaatatattgttattaagtatggccatcatgatgtacaatagatcacttgaatttattcctcctaactgaaattttgtatcctttcactaagatctgtctgtattccccaccccccagcctctggtaagcaccatcttactccgtttctgtcagtttaactgttttagattccatttgtttctctgtgtctcacttatttcacttaatgtcctccaggaaatacatgttataattaatggcaagctttctttcttttttaaaattactgaatagtattctatagtgtatataaaccacatcttctttatccattttttgttgatggacacttaggttgatttttgctattgtgtatatttttgctattgtgtatatttttgctattgtgtataatgctgcaatgaacatgggagtgagatatcttttcaaataaggctttctttgggtatatatccagaactgggattcctggatcatatgatatttctatttttaattttttgaggaacccccttactattttccataaaggctatactaatttatatttccaccaatagagtgcaagggttttctttctctgcatcctctccaacattatcttttattttttttgataatagccattctaacatgtgtgaggtgatctcactgtggttttaatttgcatttttctaatgattggtgatgttgagcattttttatatacctggccatgtctttgagaaatgtctattcaatcatttgtccaatttttcattgggctgttagttttcttactactgagttgtttgagttccttatttattttgcatattaaacacatcagatgtatggtttgcaaatattttctactaatatttctttgggttgtctattcactctgttgattgtttccttttctgtgcagaagctttttagtttgatgtaattctatttgtctctctttatttttgttgcgtgtgctttgaggatcacctaaaaaaaccattgctcaggccaatgtcatggaggttttcccctatgttttcttcttgtagttttaaagtttatggcattatgtctaaccttttagttaattttgagttgagtttcgtaggtggtgtgagatgagggtctaatttcattcttctgcaggtggacatccagttttccaaacaccattcattaaagagactgttcttttctcattatgtgtttttggcacttttgttgaaaatcagttggctgtaaatacttggatttatttctaggttccttattctattgtattggtctatgtgtctctttttatgccagtaccatactgtttttattaccatagctttgtagtatattttcaaattaagtactataatgccttcagctttgttcttcttgctcaagattgctttgtctgtttagagtcttttgtgattccacataaattttaagattgtttctctatttctacgaaaaatgtcattggaattttgataagaactgtattgaatttattgattattttgggtagtatgaacattttagcagttttagttcttccaatccatgaacaaggaattttttcatttatcgtcttcaatttcttttaccaatgccttacagatttcactatacatatctttcacctctttggtttaatttatgcctgagcattttcatgttttgaaaataggattgttttattgattcttttaaaaatagtttgttgttagtgtaacactacttttttaaaaaaatataaattaagttctaggatacacgtgcagaacatgcaggtttgttacacaggtataaatgtgccttggtggtttgttgcactgatcaacccatcatctacattaggtgtctctcctaatgctagccctctcctagcctcccacccactgacaagccccagtgtgtgatgttctcctccctgtgtccatgtgttctcattattcaactccaacttataagtgagaacatgcggtgtttgattttccgttcctgcgttagtttgctgagaatgatggtttccagcttcatccatgtccctgcaaaggacatgaactcatcattttttatgggtgcatagtattccatggtgcttatgtaccacattttctttatccagtttatcattgttgggcatttgggttggttccaagtctttgctattgtgaacagtgctgcaatagacaaacgtgtgcatgtgtctttatagtagcatgatttataatcctttgggtatatacccagtaatgggatagcatgatttataatcctttaggtatatacccagtaatgggattgctgggtcaaatggtatttctggttctagatccttgaggaatcgccacactgtcttctacaatggttgaactaatttacactcccaccaacatcgtaaaagtgttcctatttctccacatcttctccagcatctgttgtttcctgactttttaatgatcaccattctaactggtgtgagatggtatctcattatggttttgatttgcatttctctaatgaccagtgataatgaactttttttcatatgtttgttgggcacataaatgtcttcttttgagaagtgtctgtttatatcctttgcccactttttgatagggttgtttgatttttttcttgtaaatttaagatacttgtagattctggatattagccctttgtcagatggatagattgcaaaaattttctcccattctttaggttgcttgttcattctgatgatagtttcttttgctatgcagatgttctttagtttaattagatcccatttgttgattttggcttttgttgcctttgcttttggtgttttacacatgaagtctttgcccatgcctatgtcctgaatggtatttcccagttttcttgtaggatttttatggttttaggtcttacatttaagtctttaatccatcttgagataatttttgtataaggcgtaaggaagggtccagtttctgttttctgcatatggctagccagttttcccaacaccatttattgaatagggaatcctttccccattgcttgtttttgtgaggtttgtcaaaatcagatggttgcagatgtgtggtgttatttctgaggcctctcttctgttccattgctctatatatttgttttggtaccagtaccatgctgttttggttactgtagccttgtagtatagtttgaagtcagatagcgtgatgcctccagctttgttctttttgcttagaattgtgttggctatacaggctcttttttggtgccatgtgaaatttaaagtagtttttctaattctgcgaagaaagttaatggtagcttgattgggatagcattgaatctataaattcctttgggcagtatggccattttcacgatattgattcttcctatccatgaacatggaatgtttttccatttgtttgtgtcttctctcatttccttgagcagtggtttgtagttctccttgaagaggtccttcacatcccttgtaaattgtactcctaggtattttattctctttgtagcaattgtgaatgagagttcactcatgatttggctatttgtttgtctattactggtgtataagaatgcttgtgatttttgcatgttgattttgtatcctgagagtttgctgaagttgcttatcagcttaaggagattttgggctgagacgatggggttttctaaatatgtaatcatgtcacctgcaaacagagacaatttgacatcctttcttcctatctgaataccccttatttctttctcttgcttgattgtcctggccagaacttccaatactatgttgagtaggcgtggtgagaaagggcatctttgtcttgtgctggttttccaagaaaatgcttccagctcttgcctattcagaatgatactggctgtgggtttgtcataaacagctcttattattttgaaatatgttccatcaatacctagtttattgagtgtttgtagcatgaaggggtgttcaattttattgaaggccttttctgcatttattgagataatcatgtggtttttgtcgttggttctgtttatctgatggattacgtttattgatttgtgtatgttgaaccagccttacatcccagggatgaagctgactagctcatggtgaataagctttttgatgtgctgttgaattgtttgctagtattttattgaagattttcacatcaatgtccatcagggatattggcctgaaattttcttttttgttgttgttgtgtctctgccctgttttggtatcaagatgatgctgacttcataaaatgagttagggaggagtccctctttttctatagtttggaatagtttcagaaggaatgataccaggtcatcttagtacctctggtagaatttggctgtgaatctgtgtggtcctggaatttttttggttggtaagctgctaattattgcctcaatttcagagcctgttattggtctattcagagattcaacttcttcctggtttagtcttgggagggtgtatgtgtccagaagtttatcaatttcttctagattttctggtttatttgcgtagtggtgtttataatattctctgatggtagtttgtatttctgtgagatcagtggtgatatctctttatcgttttttgttgtgtctgattcttctctcttttctcccttttcataaagcatttcatggattcattgactttttgaagggttttttgtgtctgtatctccttcaattttgctctgattttagttatttcttgtcttctgctagcttttgaatttgtttgctcttgcttctctagttcttctaattgtgatgttaaggtgtcagttttagatcttttcctctttctgatgttggcattcagtgctataaattttcctctaaacactgctctagctgtgtcccagagattctagtacattgtgtctttgttctcattggtttcaaagaacttctttatttctgccttaattttgttatttacccagtagtcattcaggagcaggttgttcagtttccatgtagttgtgtagttttgagtgagtttcttaatcttgagttctaatttgattgcactgtggtctgagagactgttttgtatgatttctcttttgcatttgctgaggagtgtcttactcccaattatgtggccaattttagattaagtgtaatgtggttctgagaagaatgcatattctgctgattaggggtgaagagttctgtagatgtctattaggtctgcttggtccagagctgagttcaagttctgaatatccttattaattttctgtctcactgatctgtctaatattgacagtggggtgttaaagtctcccactattattgtgcaggagtctgagtctctttgtaggtctctaagaacttgctttatgaaactgggtgcacttgtattgggtgcgtatatatttaggatagttagctcttctcgttgcactgatccctttaccgttatgtaattcccttctttgtcttttttgatttaaagtctgttttatcagagactaggattgctactgctgcttttttttttttttggctttccatttgcttggtaaatattcctccatccctttattttgagcctgtgtgtgtctttgcacatgagatgggtctcctgaatacagcacactgatgggtcttgactctttatccaatttatcagtatgtgtcttttaattggagcatttagcccatttatatttaaggttaatattgttatgtgtgaatttgatcatgtcattatgatgctagctggttattttgcctgttagttgatgcagtttcttcataatgtcaatagtctttacaatactgcaaaaacagtactgatttttttatgttgatttatatcctgaactagttcattagttttaacagtttttggtgtaatatttggggtttctatatataacaataggtaatcagtatacaaagaccatttctttccttcctccctccctccctttctctctctctttctttctctctctcttttgttcattccgatttgtatgcttttaatttctttctcttgcctaattgccatggctataacttccagtactaggttgaatagaagtggtgagagtgggcatctttgctttgtttctgatctgagagggaaaactttcaaattgatggtctcagctgtggggttgtcatacatggtctttattgtgttgtcatacattccttataaccaatttgttgagacatttcttatgaagaaatgttgaatgtttttcaaattcttttccaatctcaaagtaccagaattcttcctgaggtgtttttttttttttttttggcagggtcttgctctgtcacccagactagagtgcagtggtgtgatcatggctcactgcagacttgaccttctggtctccgggaatcctgcctcagccccctgaatagctggaactatggaactatgagcatgcaccaccacacttggctaatttttaaatttctgtaggataggtgtctcactacatagcccaagttggtcttgaacttctgggctgaagcaattctcctgccttggcttcccaaagtgctgggattagaggtataagccaccatgcctggtcctttcatgagtttttatgcttgcaattcagattaataagtgaatgacagtgagaattcaattctccaatgcctactctcataatctaaagaaagcaaggcagaagtgttttcctgaaaggaagaatctttgtttttagttttttaaagattaggtttactggatgtcagaaaaatatgtttacattaaggcaacattgagtattgatgatggtatgtaagttcttagctgtcaagcctcttaaacagtgttctctgaattttacatatgtgaaaagacattaatcctcttagactttggggttgttgtgtgaggcctaggaggagcacactagcagtggccagtcttctttaatcaagaacagccttatacattccatgttatgtgtgctatgatgtgaaaatatttggaaaactctctcttcccccattgctgccagacttatggtctttctttgttcccaggtggctgatttaggttccaggcagaatggaattgggtgccctggaagcctgaggtagatttggtactatggagggtgcacttgctgatatgaagttttattttatacaaatcctggagaagctaagtgaggccatgtcagtgttgccagaagacatgagaatcatgccagatctctgtggcttaacattggaacatagtggtaagtgcagctatatttgtgtttcttaatagttgaaagccaggtttatataaataggaagaaagagtttgccatagaatttatgctttagttggagaaaaatgtaaagttgttgataaattaggctgattaaaaaataatgtgaacacttaaattacctttaatggagtgcagccttgagaagaagataccacgtggtccaagtctatatcaaatttgagtttaaaatagatactttcagaaaagaatcaaaaggaagaaagtcttaatgttcacattgagttaaggtgatggctagctttggaactggagttcagccagtagaagatgtgttcaggtccttttaatcccaaaaagtggatgcgaaataaccataaatatatgtcagaagagtaaaaaaagccagcaagttaagatagcaacaaaatatggctaaaatgagcattgcaatgtccaggaaagcataaactacacgcaaaaaagctcaagaatgggatgaccaactgagcaaacagtgaactgaaaagatatgtaaattattgtaacaagtgctaaattataagtaaggtcagagcaaatattgaaacacttgatgaatattttctactgcacttggagaagttaaattgatgtcagggactcagggacttagaattggggagaatgaagcaatcagaaagtaagtaccagtcaatcatcagtcaaaaggggctttgaggaaattgatttatgcttctgtaaagacttttgatggaggaagaaacaaaatataaattaaattatttgaacacattattaaaggctttatttgtttttaactgatatacgtaattgtttaagatgatgtaaaaattttccaagttcgtttacaatttaaagagtttgtattgtttagaagtctgtaaaggatgtgagagaaacactgggtaattcttcttcatgtatttttattttcttttttatgtaaacaacataaatttattgcttacagttctggaggctgggaagttcaagatcaaggtaccagcaaatttcattacctggtaagcattcatttcttatggatggtgccttctgtgtgtccggtgtaaagggcaaaacaggctccctttcctcaagcctcttgtcattaaagcctgtaaaaattacagtaaaagtattcagaatgggttaagcaatttgaccgtcaggaaattcaattgaaaagtgaggttcaaaaccttcctcagaaagttaaagttctaaattgtattgagaaaatacaataaagattcacagaatatttatattagaatgaattaattaaatacagaacattttaaaggcaactaaaaagatcagccatgctcattaagtaacagatacctacagaaaatgtctgtctttgtcttgcatttaaaaattgatatatcatagttatacataggccaaacttctttttttatttattatactttaagttttagagtacatgtgcacaacgtgcaggtctgttacatatgtatacatgtgccatgttggtgtgctgcacccagtaactcgtcatttaacattagatataactcctaacgctatccctcccccctccccccaccccacaacaggccctggcacgtgatgttccccttcctgtgaccatgtgttctcattgttcaattcccacctatgagtgagaacatgcggtgtttggttttttgtccttgtgatagtttgctgagaatgatggtttccagcttcatccatgtccctacaaaggaaatgaactcatcattttttatggctgcatagtattccatggtgtatatgtgccatattttcttaatccagtctatcattgttggacatttgggttggttccaagtctttgctattgtgaatagtactgcaataaacatgcatgtgcatgtgtctttacagcagcatgatttataatcctttgggtatatactcagtaatgggatagctgggtcaaatggtatttctagttctagatgcctgaggaatcgccacaccaacttccacaatggttgaactagtttacagtcccaccaacagtgtaaaagtgttcctatttctccacatcctctccagcacctgttgtttcctgactttttttttttttttttttttttttttttttgagacggagtctcgctctgtcgcccaggctggagtgcagtggcgcgatctcggctcactgcaagctccgcctcccgggttcatgccattctcctgcctcagcctcccgagtagctgggactacaggcgcccgctaccacgcccggctaattttttgtatttttagtagagacggggtctcgatctcctgacctcgtgatccgcccgcctcggcctcccaaagtgctgggattacaggcgtgagccaccgcgcccggcctgtttcctgactttttaatgatcgtcattctaactggtgtgaaatggtatctcactgtggttttgatttgcgtttctctgatggccagtgatgatgagcattttttcatgtgtcttttggctgcataaatgtcttgttttgagaagtgtctgttcatgtccttcacccactttttgatggggttgtttgtttttttcttgtaaatttgtttgagttcattttagattctggatattagccctttgtcagatgagtaggttgcaaaaattttctcccattctgtaggttgcctattgactctgatggtagtttcttttgctgtgcagaagctctttagtttaattagatcccatttgtcaattttggcttttgttgccattgcttttggtgttttagacatgaagtccttgcccatgcctatgtcctgaatggtattgcctaggttttgttctagggtttttctggttttaggtctaacattgaagtctttaatccatcttgaattaatttttgtataaggtgtaaggaagggatccagtttcagctttctccatatggctagccagttttcccagcaccatttattaaatagggaatcctttccccattgcttatttttgtcagatttgtcaaagattagatagctgtagatatgtggcgttatttctgagggctctgttctgttccattggtctatatctctgttttggtaccagtaccatgctgttttggttactgtagccttgtagtatagtttgaagtcaggtagtgtgatgcctccagctttgttcttttggcttaggattgacttggcaatgtgggctcttttttggttccatatgaactttaaagtacttttttccaattctgtgaagaaagtcattggtagcttgatggggatggcgctgaatctataaattacctttggcagtatggccattttcacaatattgattctccctacacatgagcatggaatgttcttccatttgtatcctcttttatttcattgagcagtggtctgtagttctccttgaagaggtccttcacatcccttgtaagttggattcctaggtattttattctctttgaagcaattgtgaatgggagttcactcatgatttggctctctgtttgtctgttattggtgtataagaatacttgtgatttttgcacattgattttgtatcctgagactttgctgaagttgcttatcagcttaaggagattttgggctgagacgatggggttttctagatatacaatcatgtcatctgcaagcaggggcactttgacttcctctttttctaattgaataccctttatttctttctcctgcctgattgccctggccagaacttccaacactatgttgaataggagtggtgagagagggcatccctgtcttgtgtacataggccaaaattcttaaagaaaaattggaaaaaattacttgttcctatcaaagactcactatttcccatatttaaaaagcttatagttattgacttatagttcagttgaacctcaatgaggttcaatgagttaggaaaatccatatgaaagaccagagatcagctaattttccccacaagagccagatggaaaatagttcaggttttgcaggccaggaagcaaaatttaaatattatgaaataattaaatattaaatattatgaaaataagtaaataaaatttaaatattatgaaactataaatattaaatattaggcaacaagacagaaaaattcccacataatgttctattggctaaaaaaaaaaaaccctgacaatagtgaatgctagaaaaaaaatgcagaacaaggggaactcttatttattactgatgagaatgcaaaatgttaaaatcactttgaggaaccacttggcagtttcttataaagcttaaaataaactcaacatatgacccaaccccatcattcttcatagaactagaaaaaacaatcctaaaattcatgtggaaccaaaaaagagcccccatagccaaagcaagactaagcaaaaagaacaaatctggaggcatcacattacctgatttgaaactatactataaggccatagtcaccaaaacagcatggtatgggtataaaagtaggcacatagacccatggaacagaatagagaaccaagaaataaaaccaaatacttataaccaactgatctttgacaaagcaaacagaaacataaagtggggagaggacatgctattcaacagatgttgctgggataattggcaagccatatgtaggataatgaaccaggatcctcatctctcaccttatacaaaaatcaactcaagatggatcaaagctgagtgcggtggctcacgcctgtaatcccagcactttgggaagccgaggcaggtggatcacgaggtcaggagatcaagaccattctggctaacatggtgaaaccccgtctctactaaaaatacaaaaaattagctgggcatggcagcgggcgcctgtagtcccagctactcgggaggctgaggcaggagaatggcgtgaacccaggcagcagagcttgcagtgagctggtattgagccactgcactctagcctgggggacagagcaagactctgtctaaaaaaaaaaaaaaaaagatggatcaaagacttaaatctaagacctaagacctgaaactataaaaattctagaagataacattgaaaaaaaccttctagacattggctcaggcaaagatttctgaccaagaacccaaaagcaaatgcaacaaaatccaagataaataggtggggtttaatgaaactaaagagctttggcacagcaaaagaacagtcagcagagtagattactcacaaagtgggagaaaatttttcacaatctatacaatctgtacatctgacaaaggactaataatccagtatttacaaggaactcagacaaattagcaagaaaaaatcaaacaatcccatcaataagtgggctaaggacatgaatagacaattctcaaaagaagatatacaaatggccagcaaacatatgaataaatgctcaacatcactaatgatcagagaaatgcaaatcaaaactgccatgagataccaaccttactcctgcaagaatgaccattataaaaaatttttaaaaaatatatattggcatggatgtggtgaaagggaacacttctacactgccgatgggaatgtaaactagtacaaccactatggaaaacagtgttgagattccttaaagaactaaaagtggaactaccatttgatccagcaatccccttactgggtatctactcagaggaaaagaagtcattatacgaaaaatatacttgcacatgcatgtttatagcagcacaatttgcaattgcaaaaatgtggaaccagtccaaatgcccatcaatcaacgaatagataaagaaactgtggtatatatatatatatatatatatacacacaatggaatactactcagccataaaaaggaatgaattaatggcattcacaacaacctagatgggattggagactattattctaaatgaagtaactcaggaatggaaaaccaaatattgtatgttcttgctcataagagggagcgaagcaatgaggatgcaaaggcataagaatgatacaatggactttggggactgggtgggggaaagggtaggaggggagggagggataaaagactacaaattgagttcagtgtatactgctcaggtggtgggtgcaccaaaatctcacaaatcaccactaaagaacttatgtaaccaaataccacctgttacctaaaaacctatggagataaaaaatttaaaaaaacattcagctacaaacctcttttgctacactcattgtttagtatatgacacatttttgcatgattctgttatataggttttaatagtaggtaattaggacagtgggtaatacttatcattcattcatttatttaaaaaatacttatttagagcccattctctcaatacaggtcagtactatgaaggagaggtacacagtgaaatcaggcctagtccttacagacatgttggtatgccagggagtcaactttcctccaaaagagtgatgtttccttgtctccaacaatggcaaaactataatatataatatttctttatcagcggtttgcacattgtgtgttaatagattttgttcttgtcattcagaagagcacagtggaaatacatgaaggatgggcagatgtgtgaaggcctcaaatgaatgtatgtagttgttagaaaaacaaatgtttttcttaaacacaagttgaaagacaggggagcagaggaagtataagaaaaattatggatttataatgaggagagttgatgttatggataaagtcaacagaacactgccttcttacatcattatccaactttctactttgtcacctctatctcaaaattgacggtctgatagctagtttattttatatttgccccaggttgtgctctaccttctttttccattttccttctgctgaatattctgattttaaatgatgagacgatttaatccttcggttacctaccaaatacatctaattttctcattctaggtaggttgtcttcccattgaagggtgagtggctctcaatattaagagacaacatagaaatttctgaagattttaacttctccatctgataacctagaaataattacttcagtcaaatacctcagaaggaagaaatcccattaagatcgataggaaagagtcagatattatttttgaattattttatttgtaaaggatcagtgaatttgtggttgagagggtcagttatggaatatgagatattaacctatttgatcttgctggcaatccataaaaagttaatttgcaaataaaagattagcctttaaatcacattcataataacaagaaggtaaactgcagtctatattactcatatatatttttcaaagtaacacataaaatgataggacttgatttttgctctgagtaaatgagtcagtctattaacatttatttattgcccactttttagatgcctatggatatttctagataaatacaaaggaatataaggacatagttctcactaccatgcaaattgcagacaatctgaggattaggattcacacttgaaatgatatccaacaaaccccattgtgtggtacaaaagcatatatgtagacagggtgggtagtaaagaatgctaacaattttggaggaggttaaatcaacatgtaattttagaacaggagatcttctgacctgtatatgaagaatgtggagtataaaaataattacttttgttctcttcctggtgatacaaaaagacaagaagcctcctcattgccccttttatgtccctgttgctcaaagtgtagataaaagggttaagcataggagtcaccaaactgtagaacagggacatgaatttgtttttgtcctgggagttggcagagggctgtacatacatgctaattacaggcccatagaggagagatacaatatgagaaccacatgtgttgaagacctccttctttccccctgaggactgaatcctcagcacagtagctacaatgaatccacagtaagcaaagataattgattagagaacgagggactaaaatatcctcacaatggagagcatagatacattgaatgtggtgtcaaaacgtgatatcttgatcatcgctgagacctcacacagaaagtcgtccaccttgttaccgcctagtggcagctggacggcaagggatgactgaagtagagttggccaaactgcttagccatgccatggccactaggaggacacagagttgctgatgcatgatagctgggtacctcaagtgtttgcagatggcaatgtaaggatccaaagacgtcacagctaaaatgatgcatttggtgctcccctaaaatatcccctgggtaccacaataattgagatgttgtccaccagtatgcagagataagcaacaagccccattatgaagagaaacatttccggctaggggtggtcaaagaaaccccagagaatgaagatctttcgagcaattgcattgcccagattcctgtcattgctcttgttggtggatttgagggaaaggaaaggctactttagtattgaatttttctgatactccacttattcagttaagtaaaataaactgagttatgaaggggttttctctgtgatgtaactaaactgatgtgatttgacacttgtaagcatgaaaaattttatctaaaggccaaaatgttacctttctagtgcctctaaaaggaagatcaacaaatctctgtatcttacccaagaaatgcaatatagcaaacttttacagaataatgattaagtaatgggaaacataattaatcttatattagaaaaatgaatcagatggagaaatgaataattttaaagaatgcccaagaactacccatgctaactaacacgtgttaatttctttcatccaaaatctgttggccctggtcatgttctggttcaatttgtgagttgatgtaggtgagttcagaactcactgagctccacgtggatcagtctgatttgcatagaaacaacatagtgctattccttacctcttcttcccaaatcctggaatgacgatcgccaacataaaacttttgtcataaaaggaagcacacagctgaaaggaaatggttccttgcaacacgttcagtacttacaagacaagataattcattgcacagccaagtgatataaggtcattaaagtatcagcagttatacagtatgatgtatgttagtgcttttcacactgtgagttgtaatctattacgcagttatatactattttattgatttattttacttattctcatcactcattttatatatgtgtttgtatgacctggattctgatgtacaatatattccttactataggtaatggtaaaaaatttggacaatactggcatagtagaaaagaaacaagaatgatattagaaaatctagatttagtccacttcccaattactaatacatgtacattttaggtcttgcttaaatattcagaaacttctttatctatcttgctccgttgtggagattaattagcaccatatgtgtgaacacgctttattaagtccaatactcaatgttgggttggttatttttcatgaaataaagttccctgtttgattttaagtctatatctgatagttaatttttctttgtatccaaatattaaccatgtccttatattcccataagaagtcttagaagggttgttttttctaccattttatttccctacattactcagatcccttgccttgaatctgatgttaatgatttctagattttaatatcagtacacatatgtttttaatcagtggaaatgctcacaaatgcaaacagtaccatagattatttttcaaaaacatgtttcaatgttttaaattataatgattagtattagtattaataggtgtcaatttatttatactttttttaactgctccttgcctagcagggctatcctataggcagtgtgcccacagtagccttttttaaaatagtttttttagtatgcaaattttcataaggagatcacaacatgcatgtggttgtataaaaagattaaatcaatcaagctaaatagatcatttctactcatatgcaacagttgcctaaatcagtgttgatattttttaggggtaccctcttttcttgcaaaaaagaacattaatctttttcttccatcagaattcagtgttaattggggataaagattgaatgttctttctgtattcagtggttttatgtcatatcagaggtctttaatagttatttatttgattgaaaggatcccaaatcttttgatttattgtttatttatttatttatgctttaacttttaattaaaatgcttaggatacagattgactttcttttgtaaatgactgttttactttttctgaaataggacatacatgcactctgataaaacagaatgaaacatcttaattcatgagaattcctgtacaaggcgctgatcctgtgtttagagctgagctcctcacagcagctgccctacgtagaaccgacagttttctagcttgcaacaaagttactagggacaaatagggaaaaaaaatccgaaactaaaagtaagaaaaccaacatggaagcaatcatacttctcatgtctctgataagagaagtatggggaacctttaaccaaaggaaaatttaaaaaaaatgcaagttaactatctagttcattcactgttagctagatttgttcagttaaggctttaacccctttccaaacaattttatcttaatccagctatgcttgctaataaatgaaatgcatgcacttcccggaaatatacttcactgagcctctgcattcagtacctggcagtgaaaaagtatgtttcccgaacaagtcagtactgaagactgagaactccaactaaataactatactctctccccaataatatgttatccacattttccctaccctcacattagaataaagatatcctcctaacttttcatctcctatctcctgtcttttcctaggagatcttatcttttgatcttttactacaagggtagaatttaggttaagatcataaaaaaccaatttcacatgtgacactaagaaaatggaatgctataaaatcaatcctcatcaccgtggtagggatgctgttgcttttatcctgagtctttactgccaataagtgatgctgcttccaaaggaacagctctacagaaagtttttgagttagtgtttccccccagcttatttctacaatggggaaaggcaatttcatattaaaaaaatccacacaaacacacctggaaaagctacagatgttaacctttactttaaacacagcaacgtagatatctaaggagataagatgtaagacaaagagctcaggaaaaatccaatagagaccaaattctgcaaatggaaattttaaagcccagtgagtaaatttttcctgcattcagacaagtgctacaatacatttaagtcctcaactcccagaattaagagcccttaagctgttaactttgtcctgtcttcctattcagaaaaattttcctctagaatctgtgcaaaagtaactgacacacctgcagtatgtgacaacataagagatgttctcaactttttcatgaggtgaaagttactttttataactgaaaatgaaaaaggaaggtgctatagagggaaataaaatttcaccaaagtataaaagtaaagactggatgaaacctataactttataaataagaataataacagtaacttacactataattaactgctcaatagtgaatgatctgctacacattccttgagaaggaatgaccctagcttaccacagtggaaacctgccgcaattacaaggccaggattctgccccttttctggttctctgttcacaaggtaatgccaccttctccaaggcagttagagagacaggtgagctcaggggagcttctctcaccaacctgctaactcagcaggagtgagtttacccaaatgagctctggcctccaatgtgtatctgttcataattttatgaagtatctaaatgtcattcattagtttaaaaaagaatagaaaactctggactaagtaaattttgaactcgaaaagttagaaggggtatcaattatattaacaacactttctttaaaaatagaatcactttcttttgaaatcaaccagagtggtgagatgtgtttttcttttcaggtgccccataatggcacacagctttactcagcaacccctgccagcttccaagccccaggatactgacctgcaccagcacatggggcagcattacctccccaacagtgtggagaagagaacatttcaccactgggtgatgagagtagacagtgactcttggcttctcaatgctagacatgattggagacctttcattgttctattagaaaagtccatgaagaagctgtgaacaggatcagtccagaggagaaaaactcttattttctctgtccaaacatcagtcaatacattgggagagccagcagaatccctcgccctagccttgcctcttgagcacactgcacatgaacacttcagtggggtgagcgttcagctcctaaagggccatgttcctctttcctgtggtctgtccagaaagcccaaatatctcaaagagtttttcttcacttattgcattgttctgtctattttgttacccaatataaggattggcacattggatattatttcatcagtcattaaagcattaagctcaactttagattccatgaggccagaatgatctgcagaatccaccagaaaaacaatctcattaattgcttggagataattttttcaaacctgacatgcttgcttgtgtccaccaagatcaagagttgtaaaagtcattccagcaattaatagcttttctgatgtcggatgtagtgttggaacatgttgacccaatctgtcatctttgagcatgtgaagaagagtggttttgcctgcgttgtccaaaccgaaaaatacaagttttccaaatttcttgtagagtcctaggaactggagcacactgctgaagccattgtagatccactcaaagaggaaagacattattcatgcttattatggcctgaagggctcctccagcaaaggtgggtggcccaggccctccctcagagcacaccccaaatattttcaaatatgaaaacctacttactctttagaggtaaggaaggtactttaaaaaatttattttattttatttaagttctgggatacatgtgtgggatgtgcaggtttgttacataagtaaacgtgtgccatggtggtttgctgcatctatcaacccatcacgtatgtattaagcccagcatgcattagctatttttcctgatgttctccctcccctctccacccccagacaggccccactgtgtgttgttctcctccctgtatccatgttttctcattgctcagctcatcattccatgagtgaaaacatgcagggtttggttttctgcataatggttcctgcataatggcttccagctccatccatgtccctgcaaaggacacgatcttgttctaaaggtactttaaaaaaagtactttatagggttgccactcactctataaagctgtgaaactttgttctctgtacagataatagagttgaaatttcttggtaagggtcattatagcaattccttagtgggtatgcttccctctaacttccttgccataataaaatgaaatgataaattttggcacctgttatttataatggactcaggtctgagagaagccaaggaaactgaatctgccttaacaattttataaaaatttccttggatcacaaggaggaaattaagattattattttaggtgccaagatctaattttcttttatttatagtttttctcaagatattatttctttagatttctgctaccatagagccatcataatcctagttccacatacagacaaaagaagtcttcaataatttcttccacaataacccaacacagtatagactttttaccttccattgactacattaaagttcctcattttatttaaaccataaaaacattgtgtcaagaagatattaacatacattaatgttattaaaacatgattaaaaatcatggaatctggaattttgaaaatatgggtcctgaaaacttttggccatgggcttgtttttaaagtaattgcttttttcacccatggttcacaattagcagcagatctagcaatctggaatccttctagccaagttcacactgatcatctcaggcttgttctttgctcccacttttgttttcatcatttgctgcattctataactatattcagcttctggtcctttattttttaaaacaatatttaattgacaataaagattgtatatattcaaggtgtgcagtgtgatgatttgatatacgtataccctttgtttttatttcttttctgtctgaatccactcccacccaattcattattgacattaatgaatacatttgacttattctcggtaaccctcagctttatgtagggatacagtatatatatatatattttttttccctattatagctttaattttaaaacatgatcctttctgatggtattagtttccttacatcatcctgctggtgtggaagtgaaaagtgaatgataaattcttactacacagttaatctagttaatgaaactatcattctcagcaaactaacccaagaacagaaaaccaaacactgcatgttctcactcataagtgggagttaaacaatgagaacacatggaacagggagaggaacatcccacactggggcctgtcagggatggaggactgggggagggatagcattaggagaaatacctaatgtagatgacaggttggtgggtgcagcaaaccaccatggcacatgtatacctatgtaacaaaccttcacatcctgcacatgtaccccagaaaaactgtaataataaaaaaaggtaaaatagcgatataaaatagaaatttatgagtatatactgataaaaatataaaaaatgaatacatgaagggggaaaagggaaaactcttaatggcacatcagttaataaatatagagggcatactaggattggagaattattaatagatgttaaaattagtgggtgaaagtttaagacatttacatagttatgctgtctgccacaaattacttattaatttctcaggaaaaaggcataatgagatctgggggacaccatgttagtcaagtgactaaagttaacagcatcgattttaagacaaactatccttatacacttttctgaaatgttgcatcattattggctcctgaatgggagaaaatataaagaacattttggagataattaacaagatctgaatatgaactattgattacataatagtattatatgactgtaaaatgtcccagtttttatgattgtactggctatgtatggaagttaatgtccttagcaactatacactaaagtgtatgtagtaataaaaaggttgggaaaaatttcatagatatgaaaactacatttatatattacatatgtgtaaaagtaaggcaaatgtaaatgaatgatgactctggaaaagggtatttaaagttctgtattatacttgcaactttaaaaattacattaaaaatacattataaatgtaaaatgtagtaaactacattaaataaaaagatgacaataaaaagaacacttgtggttatgatacttcctgccagatcaaggccttagcatctactgttttgtctactctgaagaatttactacctcacttatagatctgagcctaaatgacacttccctagaagagctttccttgaacctttcctggtttaaactaatcacccatccattttattcatgaagccttgtcatttttactttatagtacttagtacaacttgtaattacatgtttagtattattatttgttttctttctcccactagactataaagtttgtgagggaaggaattgtgtctgtcttattcactaacaaatactcggcaaatagcaaaatctgtatgtatagtaagcgattgaaaaacattaggcaaatttataactattttaatatctgtatatactatatatctatatataatatctttgctctggatgtgcacttaggaaggcagagaaaatttaagtgtctctgatttaggtggtatgtgataataatgtagatacaagtaatataaaaatattttagaacattgatggtgattcaaattttagagctcaacccatcttatttttgttatttaagttactaatgccccccaaagtataaatatttataaaattatttttaagaagactttgggaaattattaatggtaagcttgaaggttggagtagatatttctaaaattagttgccaaatttataaatacattaataaaaatttcactatcaataatttttatttcaaataaaattcaactttaggttattatggctttaagatagtgtctaatgggaagcaaataaacattaatgcaagacttttcaaggtgaaatagacttagagcaccagttttatgatgtttagactttttcctaatacttaagaaattgtatgatgaaatcagaaaatacagaaaaataagaagcctggaataaaaatttcctgatatcctgtcacttacctcaccacagttagcttggtgaacttatttctagtgttttcttacacatataggtatacataaaattagggtcatgttctaagtgtagaatcgtttcttgagttttctccaccacttaacagtgagtatttctccataatattattttttttaaaaaaaatggccaattaacatatgctggtaaacaagtccatcataaaggcttaaaccaacaaatatttcatttttgcttatgttttgtgtttattgaatgttgctagggacttgtccatgtcattgtgcattagggatccaaactgatgaagtagacactatccaaagttctctagattgttgtgatagagggaaataaaagttgcaaaacacactctgcccttaaaatgtcttcccagaagttaaacaatcactgtaaccactgggcagttcttgtgaggcgttccaaatgtgagtttggaaatgtccctatatcccactcattgaaaagtagctcctccatccattgttcttcataaccctcgggttccactcagttgttaggttcattatctgccttctaagttattgcaggtgatagtttatgaaatgtttccttattgtataacatggatcactttatctcccttcctccctccctcccttcctccctcccttctctttttccttccttccttccttccttccctttttccttccttccttcccttttttttcttctttcccttccctccctccctctctctttctctttcttttctttcctttctctctttctttctttctctttcttttctttcttttttctcctctttctttcaccctccctgtctttctttcttctttctttctttttctttctttctctctttcttctctttctttcttttttttgagacagggtcttctctgtctgtactctgcagtggtgtgatcttggctccctgctgccttaacctcccaggctcaggtgatccttctgcctcagcatcccctagtagctgggactacaagtgtttgctcctacacccaatgaatttttgtatttttttagagatgagttttcactactttgctcaggcttgtcttgaactcctgagctcaggcaatctgcccaccttggcctcccaaagtgctgggattacaggtgtgagccaccaaacctggcaccataatttcaatctctctcattttttattagacttttactttaggttcaggggtacatgtgcaggtttgttacgtaggtaaatcgtatttcatagggtttgttgtatagactatttcaccacccaggtgataagcatagtatatgataggtagttttttagtccttaaaaaactaaaccaccctcaagtaggcctcagagtctacttttcccttctttgtgttcatgtgtactcagtgtttagttctcacttatgaatgagagtgtgaggtatttggttttctgtgcctacgttactttgcttaagaaaatggtcttcagctccatccatgttcctgcaaaaggcatcatctaattctttttctgtggctgcttagtattccatggtgtatatgtagcacattttctttagccagtctaccccaggagaggccggcagacaagggagcactcagattagactggtcccatcccacaggtaagatagccctgctccgttcaggtctggcagttaccataggctgagaccacctagaggagcatggtgagctttgggggaatgggcgtctctggccatgctccactgcagccgttcctgtgtcagaccctctgggcttttcacaggctgaagtcctgtccttgccacctttccaaatagctctccctgccagctcaagtgtccgcggggtcatggggtctcctgcagttgggattctggaggtctgtggcgagagtggccactcctcgtgtgttcaacggacctcttccccaggagtcactgcgggccaagaacatgggccagaaacgagtccgggtactctgcaactccgtgcaaagttccgaggtttctcaccctccagcccaggttctatgtcctccctctgtccaccctcaatgccttccctccgaagatcggctcggagtatgccagtcttcctgatatcctggtctgttgtggaagatgttcttcctggctgtgtcactgaccatcttggcccctctcagtttcaagctttactatcatatccctcatcatctgccatgtgatccttttgccagtgcctcatattttaatttcctaacatttgtttcaggctgattgagaacctacctggaacattgttttgattgccagagggaaagagaacatggcagagtatgtactagattttgaagtcatcaaaaaataacccacatcatttctcttcacattttattggcaaatcatattaaacagccaggtctgcattcgataggacagggatgtgcaattttaccatctgcctagaaggggagaaaaaataaaatatttataaacattcctaatgtattcaatttatgaaaaatactctactttcaaaatactcaaggaaataacaaataggaacttgataatgtttctgcttctaaaattggcatattcatcaaaagatgaaactctcagagtttgcaaaagctcgtgaagcaaccattctcatttgctatatacagtgatctatctgggaatgtggaatgttataaaatttctacagcacaatttgaccatatctattaactcttagatcttctaagaaatttataattagagccagtaattcagtttttcagaatataaactgacatttagacacaaattcatattgaattattggcagtagtagtaacaataatcaaaacaaggagtgtaaatatgctcaacaataggaaagtggttaaatagattttaatacacttccttggtgaaattaaatttgcagcttttttttttttttttttttttttgagatggagtctcgctctgtcgcccaggctggagtgcagtggcgcaatctcggctcactgcaaactccgcctcctgggttcacgccattctcctgcctcagcctcccgagtagctgggactacaggcgcctgccaccatgcccggctatttttttgtatttttagtagagacggggtttcaccgtgttatccaggatgatctcgatctcctgacctcgtgatccacccgcctcggcctcccaaagtgctgggattacaggtgtgagccaccatgcccggcccaatttgcagctatttcaattatgttttaaataccagaaaacataggaatattttctgatataatgcacacgaaaaaacgcaaactccgctggtagtgagttgggagaagtgcataaaggtagattgggtaacaacagagatccaggtaaaaggtggatccctttgtgttctttcattttttgtgttttctgaagatatgatcgatataggaaaaatgattcccattaacatttctataattagctctataattaaggggtcattccacatgcctgaggtagaacttgggacaaatatggaatttgacaaaagggaaaaacaaggagaaatgctatccaggggaataaagagatgaattgaaatagaatttgaaataaaactcaacagacatttcttcagtctcttctttttccacttatttgaaatgtcatctaaatattattatagttatatataatataattgtaattgtatataagataattataattatataatataattatatataatataataatatataatataataatatataatataattatatataatatatcattatcataattatatgtgatatagaactatatataatatataattatattacatcgtcaacctcatcttgcctggttttgtattgtttaactgctaaattacttgtaatgatgaaatgctttgttttgtaaagctttctctgttgcctgaaatgttgcctcatctgtgtccttacattactaactgtaaaccatcatttaaatgtctcagtttaagaatcattgccttctggaactagcacatttcttcagcagaggaactgtgatatttctcctctggactactgctgtcttgtgaacaataaatgtttattgaatgactaccacagataaagagtaagctaattcaggtcaatatgagaaaaaaggattcccattaacatttctataattagctctataatttagaaaagatgccacatacctgaggtagaacttgggacaaataaggaatttaacaaaagggaagaaaggataaatgctatccggaggaataaagagatgaattgaaaatagaatttgaaataaaactcaactgacatttaaggtttccagattgagatgcacacacttagctggtttaaaaccagctagattggttgggtgcagtggctcatgcctgtaatcccagcaatttaggaggctgagatgggtggagcacctgaggtcaggagttcgagaccagcctggccaacacaaagaaaccccgtttctactaaaaatacaaaaaattagctgggcatggtggcgggcatccgtaatcccagctacttggaaggctgaagcaggagaatcacttgaacccaggaggtggaggttgcagtgagctgagatcgtgccattgcattccagcctgggcaacaagagtaaaattcattctcaaacaaaacaaaaacaaagccagctagattgaagccaaattacataccaaaaacagttctgaaaaggtgcatatgatgaattttatcaagagatcagagggttcaaagtgtttgaagactttgattctgatggaataatttttggcttggaataactggtaatttaattataaggatattaaaatccctaactaaaggcgtagacaggatggttatagaataatagtatacaagtggaaggcaatccatcaaagtctcctgactaccctgaagttgataggaaattgacatgacttgtctcaaggaacagagtacattgggggaacttctgaaaagaaaggagtttctaactttgaagacatgtcatatgggttcagcattgcttcctaaacagaagaagacttttctttctttcctttttttttttttttttttttttttttcctgagacagattcctactctgtcacccacgctggagtgagtggcgcgatctgggctaactgcaacttctgactcctgggttcaagcgattctcttgccccagcctcctgagtatctgggattacaggcgtgtaccaccatgccctgctaatttttttgtacttttagtagagatggggtttcgccatgttggccaggctggtctcgaactcctgacctcatgtgatctgcccaccttggcccccacaaagtactgggattacaggcgtgaaccaccgcgcccagccaacagaggaaggattttctaattgttgacagaatttagtgaaatcaccagagcctggaaaataggaaaatgagttcaaaggtcattaccatcattgaagataaggaaagactaagaagattctcatcacaatggagtacttcttatttcttacagaaaaagattcttggcatcagcctcttgaaggcctccttcatatctttatttctaaggctgtagatgagggagttcaacatggatgtgatgattccatagaagagggaaaccatctttccccagtccttagaggtggatgaaggtggttgaagatacatataaatggctgttccataaaagagggacaccacaatcatgtgggacccacatgtcccaaatgctttttgccgtccttctgctgacctgatttttaatactgcttgagctatgaagccataggagatgaggatcaatgtcactggaattagaagaattagtacactaaagaagaagagctcagcctcaataggctttgtgtcagcacatgacaacttgagaagtgcaggcacctcacagaaaaagtggtccacttcctggtgaccacagcgtggcatgttaagagtcaaggaagactgcagcactgagttgccgaaaccaatgagccatgagaaggctgccatccttaggcagaaccaataattcatgatgactacatagtggaggggtctgcaaacagccacatatctgtcaaaggacataacagccagaaggagacactctgtagcacctagggccaggaagatgatgaggtgggccacacagccagcatagctgatggtctttttgttgcaaccaatatttaccaacatatgagggactgtagttgtggtatagcagagatctaagatggagagattagtgagaaagaaatacatgggagtatgaagtttgggatccagaatgcacaccatcatgatggacacattgccaaatatggtgattgtgtatgatattaacaggaccacaaaaaggggcatttgtagccaagccctatctgagaagccaagtagtataaactcttttggggagctctcattttcccaattcatgatgactcacttatttcgcactcctaaaaaaatgtaagataggaaagcaatcaatgtttgtttattgaatactcttactggagctgaattaaatttaatgaatagctcagcatcaaatacaatttacagtcaagtggataaagcccttgtaaagtataatatggttatgtttaagcttaaaagtagttcctgtgttttcagtagtgtttaaattactttaaagaaaatcattacatttaaatgacataaagtatgtaacatatgcataacacatggaaaattgtgagttctcaatgcattttatgttctctcctcttcttacctcctaacctatcttaataaacagtttagaaagaaatattacttttactccaattattttaaatttggcctgaaaatgctgagtaatatagagggtataagagttgaatctaaatctgcaattgatctaaagaaattttgcttcttttagtaacatctttacgtgtttttttgagttgtgtctgtctcctaaatgccatgcatgtaggtccatttccacaaagaactaccgtgggtattagtaataaaattatggctacttgtgatatatagtaatgaccacagatgtcatctccccatctgcaaataccttaattaaaatagcaaaactgataacataattgttgctttacttaacatgtgccagaaactgctcagtgtgtgaaatacattctttgtaattctcatcaaacccctcacagtcatggtttgcattttattgcttctgtgattcagtaagaataaataatttgcacactcattattggtgaggtcaagactaacacctaggatttaaagatcattctttcttttataccgtatttccccctaaatacacagatagtacaataagaatgactgcatacagcacaaaagtggtcataaattaaaatagaaacaaaccaaaagtcatatattcaagttgattttcttcagtctgtaaaagtcatcagttatttagttatattacctaagtgcacctaagtttcttcagtctactttgcatgtttaaatgaaatgtcatcgaggtggtttacaccatttgaatttgcaagcataaaaatagaaagatagactgaagagagaagagaaaataagtattgacacaatttaccacagaataagataacttttccagagtaaaaacactgatatataaagtataatttgataatggaatgaataaatgaaaatgaacagagatgaccttgagatttttaacttcttccattatatatgattttttttagctatagatacacattattttttggcaaataacagtaatacacctttggttgaaaaatagaagagaatatgagattaggcttttttgaatgtccatgtaaatttacaaaatgataaatatgtaaggtaatacatacattagataacttgatttagccactttataatgtacacatatatcaaaacatcatgttgtacactataaatatatacaatttttactcattaatacaattttttatatcagaaaaagactacacagaaagataaaacataaatggcaagatagaaaaatatacaatgtttatggaaaaaatggttattatattaaaatataaataattattacataataaatagaaaaagatcaaaagtccaatggaaaaaaatgagcaatggacataaataagcagtttggggaagaaaacaacataaaatgacagtgaaagtataaaagattataactttttcattattgaagaaacacaaataaaaacaagaagaaagtatcacattgtcttcctacttagtagcattaaaaaaaatcactgttaaaggttagctgttaggtacagtgcctctggagccagaatctgccagggttttattactggattgtgtgatcctgggcaatgaatgaacattcttgtgctacattaaaaaacaatctctgacttgataaaaagagagtattgtgaagctcaagtgagacaatgtatacacatctgaacttaggaccctgtcccaagcatactaagcatttaatgaatgtgagcttgatatcaatagcagtatcattaatactaatcactaataagtcattaatagtaatactatatcattatctcagcttgtcttgtatatgagaaaacagaaaatttactattggtggttcaagtgattgttataatttcataatattataacatgaaattattgaatttcatattatcactttgtctttgtttctagcataatatactgagtacatagttttccagtaaatggaagttaaatcaatgtagtaggtgatatctggttatctaaagggcatggaataaaagaggaccctattcagtagctgttattttctactcctattttttcacgtcctcttctcttcacattttatatggcactgataatttctcttattttcttcatattttatatggcgccaatttctcttttacgttatcagaaaatgaacttacctcttgacaagaacatgttgattccactgtcacgttgactttttgtcctatttctattttctacatgaatcaaaagaaatcttaaatcccactgaccgtttttatgtacggagatataatgagcaaaccattcaaaagggtgaaaggatacgaaggatttttggaatcactgaaaatacttcatattaatttcaaagttcccaggaaacaaattgggcattctgattatttaacatgatgcaactcagaggcagggatgtaggtgagatgttcttgagagatccttcccactcatggtaatataatacactgtattagacgccactcaccttttttctaaatgtccaagagatattcacgcctttctttgtgctgtgtttcaaaggaagtctggttcaaagacagattaataaatgcagttgagtttttgaattttcaatctttacgacattctaactcaactaccttttgcccactgaccaagaatgaaattagcatgaaacctggactgcatcaagaacatgtgagaaaaatacttatgaggagaggaaaatgtgtatagttagtgtgtcttcagtcattggggcatttttgactgacatgggctctcctcaccaggttcctagtggatttctacaacgagaagttgactttatagacatcaacaacattggaagtgtcatggaaagaaagttatgcctttaaataaagccaaccaatatttattaagggagtaccactcacacaattctgtgtcctctttttagccctagagattctagagtccctcaagtttaattggtcattatgtccagagagtcaataagtcaactctattcctaactgggctggttgcataatactaccacatatgtcgttcacaaattctaaaactagggtgaagattagagtaacaaaaataaacaatgaaaaataaatttaaagttgtttaattaggaaagcacaaggtttaatgaacttatagccccaaattccttttaaatagttgcaaggtcaaatagggagtcctatgatggcgtatagggaaaaatgatatttctattttcactgattttagtaataagtgtttgtaaactaaagctaccagagatctgtaggttaaaaattatgtcatacaaagtcacttaacatattaatatacacattgaaatttaaggttagcattaattcactgggtcagaacacacagaaattacatgaaattgcaatagggggaatagtttttgaaagaagcagctgagggctggggcggtggctcacgcctgtaatcccagcactttgggaggccgaagcggacggatcacctgaggtcaggagttcaagaccagcctggccaacatggtgaaacctagtgtctactaaaaatacaaaaaattagctgggcatggtggtgggtgcttgtaatctcagctactcgggaggcagaggcgggacaggagaatcgctagaacctggggagacaagataagtcattgccctccagcctgggcaacaaaagcgaaactccatctccaaaaaaaaaaagctgatttatgcaagttatgacttaatatgtgacttaataagtgcttatcctaagatcttagtaaaataaagaagttgtaattgaattgagcatcagcctagatataatcttaaggaaactaatgtgctcgtattttaatgtatctatttttcctcatttttctttttgtgtagaatatgatcattttctaaattaggacattttcttagcctgtgatttttgtaactatatgacatctgttgtagctaataatttatatataagtttaatagacatatatacatactttctatatgtaatatatatttgtaattagttttcaaatacaatttgttgtgcttggattataatagaaaagttattttattttttgtggttttacttttttaaaaaaattttaccttaagttctgggatacatgtgcagaacatgcagtattgttacataggtatatatgtgccatggtggtttgctgcacctatcaacctgtcatttaggttttaagcccctcatgcattaggtatttgtcctaacgctctcctccctgtgccgccacccttcaacaggccccagtgtgtgatgttccccttcctgtgtccacgtgttcttattttcaactcccacttatgagtgagaacgtgtggtgtttggatttctgttcccgtgttagtttgctgagaatgatggtttccagcttcatccatgtcccggcaaaggacatgaactcattcttttctatggctacatggtgtatatgtaccacattttctttatccagtctgtcactgatgggcatttgggttggttccaagtcttagctgttgtaaatggtgctgcaataaacatatgtgtgcatgtgtctttatagtagaattatttataatcccttgagtatatacccagtaatgtgattgctgggttaaatagtatttctggctctagatctttgagaaatcgccacactgtcttccacaatggctgaactaatttacatttccactaacagtgtaaaagtgttcctatttctccccagcattgccaacatctgttgtttcctgactttttttttcccaatgaaatgatttgaatggacacttaaaactgttcatgagtatacaagatgataaagaaaacatttattaaatgaataaaagctaaaaagtgaaatgttacaagcaaatatcaaatatcccgaatctctagaattttattgttgaatatgccttagttattacaagtggtctttattcttggtgacttagggattcccaagaaatgtgcaatcactcctggcaactcaaagtagtaataagttaacctcaagagaacaatcttggttaaaaaaaaattttaagtgtattttataaattattattatttttattttactttaagttctgggatatatgtgtagaacgtgcaggtttgttacataggtatacatgtgccataatggtttgctgcacctatcaacctgtcatctttaagccctgcatgcattaggtatttgtcctaatgctctccctccccttgccccccaccccctgacaggccccggtgtgtaaagttcccctccctgtgtccatgtgtgctcattgttcaactctcacttatgagtgagaacatgaggtgtttggttttctgttcctgtgttagtttgctgagaatgatggcttccagcttcatccgtatccctgcaaaggacgtgaactcattcttttttatggctacatagtattccatgctgtataattgtattaatagcacatccaggggtgcagcattgctacatgtcttctctatccaggcacactgatcgatcagggtaatttatttattcattgtttgcaaggttctatgccagccagccagtgccaaggacttcagagataagccacaatacctgcctatgtgtctggttggaacatgaacatggaaacaaaccatttaatcatttactcaataaatctttatgtcatggtgataagtgtcaggcactgtcatgtgcacaggagatatattgataatcaaaagaaataaagtctctgttctaatgaagcttacatactagtaaggagatagaaaactaataataagtaaatagatatataatacaatgtcagatagtgataaatgctatgaagaaaaagaaagcagggtaagagaatcaaaattagctgaggctgttactttagacagcatggtcagtcagtttctgtgagggggcaacatttgacctgaacagagttaggggttctcattcacttggaagattctaaactgagatttcgagtttgaattttttttgaaatgttgccagttaatgcatcaataatttatcagccggtgttcattatataacgttatactttaacaaggacactaagcactaaactatttaaagatcttcgtctttacaaaggtactacaaaggaaactacaaagactgtagtttctgaagttaagaaatgcagaccgatcctttgtttctgcattcatccatttgcattgctataaaggaatacctaagactgggtaatttacaaagaaaaaaggtttattttggctcacagttgtttcctgactttttaataatatatatattttatatatattatatatatatatatatttttttatcattgggattaaattttggcctggtgttcactttctttatatatttatgaacaatttaataatgaggtgaaatagccttaagtctgatatatgatgcacccacatataaatggaaatggcatgcacaaagacactttactattggaactgtattggaaaatttatgaaattttaggtaaaattgcacctaaaattgtgttattagtgactgtaagtagcaatgctaaatttattgtacttgatgaatgaatgtatttaggctagtcatggttactttggtttaaatgtctaaataacatctttagttttaaaaatgtgtttgtaatttgtactattgacaggaggatattcttggactgcagcggttattggcaatgtgtgatttgtgttttcttactttatagaattatctaatgtgatatgctgatttttacaggtaatatttagatatttccaataattgtatatttgacaacctactaaaatgatttgctttgggaaaaaactgaaaaacaatactcaaacataggctgcctgtaagaggctaactttaacttaaagaacacacattgactgaaaaaaatatttcatgcaagtagaaaccaaaagacagcaggggtagctctacttatattagacagactttaagtccaaaactgtaaaaagagacagagaaagtcattacatgataaaagggtcaattcatcaaaaggacgtaacaattgtaaatatatatacacctaatactagatcatctaaatgtataaagaaagtattaatagacctaaaaagaaacagactgcaatacagtaatagcagggtttttcaacacttcactttcaacaatgaacatgtcatctagacagaaatcaataaggaaacactggacttgaaacgcacattagatcaaatggacctaacagacatatatagaacattccatccaacagcaacagaatactcattcttctcaagtgcaaatgggacattatccaggatcaaatattagggaacaaaataagtctccacagttttaagaagatcgaaatcatatcaagtatcttttctgaccacaaagttatgaaagtagaagtgaataataggagaaaatttaaaatatttacaaacgtggaaattaaacaacatgctcctgaataaacaatgggttaaataaaaaatcaaaagcaaaattaaaaaaaatcttaagacagatgaaaatgaaaacacaacataccacaacttatggcatgtagcaaaagaagatattagcaagaggaatgtttgtagtaataaatgcctatattaaaaaagaagaaagatcccaaacaacctaatgttacatttcaagaaaccagaaaaagagaagagcaaactaatcccaaagttagcagaaggaaggaaataacaaagatcagagcagaaataaataagaagctagaaaacaatagaatgcattcacaaaactaagacttgaatttttgaaaagataaaaacaattggcaaaacttgagtagaccaactaagaagaaaagaagactctaataaagtcaaaaatgaaagaggagacattacaattgatactacagaagtacaaaagctcataaaagaatactatgaacaattttacaccaacgaatagggtaacctagaagaaatggttaaatttctagaaacataacaaaaatgaatcatgaaaaaaacagaaaatctgaacagactaataatgagtaaggaggttgaatcagtaataaaagtcttctaccaaacaaaaacccagaatatgatggattttgcattcatggtttggaagaattaatattattaaaatatgtgtactacctaaagtgatacacagattcagtgcaatttctataaaagttcaatgacttttttgtttcacagaaatagaaaaagcaatttaaaaattcatatggaatgacaaaaacccctaagtagctgaagcacttttgagcaaaaagagcaaagctggaggcatcacactacctgtttcaaaatatattacacagttatagtattcaaaacagaaaggtagtggcataacaacagacacacggaccaatgtaatgtgatagagagcccagagataaactcatgcatttgtggttaactgatttttgccaaagatgccaagaatgaacacactatggagaaagggcagtatctttaataaatgatgctgggaaaatcaaatacccaaatacagaacaatgaaattgaaaccttatttcacaccatatgcaaaaatcctctaaaaatggtttaaagatttaaatgtgtgaccagaaaatgtaaaattactagaagaaaacatagggaaaaatgttcttgaaattaatcttggcaataatttattggtgatgatctcaatagcacaggaaaccaaagcagaaatagacaaatgggattacctcaaaccaaaaaccttctgtataacaaagtaaataacggattgaagagacaacccatggactgggagaaaatatttacaaaccatacatggctaatatccaaaatatgtaagaaatgcaaacaacttaaatttgttagcaagaaaacaaagaaccccttttaaaactgagcaaaacacttaatggacatctttcaaaagatgacataaaagactaacagatacataacaaaatttctcaacatcaaggaaatacaaattaaaaccacaataagatatcacctcatacctgttagaatggctatatcaataaaataagagttaataagtattagcaaggatgtggagaagggaatccttatatactaatggtagtaatgtaaattaatacagccattattgaaatcagcatggaggttcctcaaaaaaagatagaattaccatatgatccagcaactatatttctgagtacatagccaaagagattgaaattaatatgttaaaaatatattggtagattttcctctaatttggtcttaacgtctctctttgaagaggagccagaaactctagccctgctctgatgggctccagtggaggtggttgtggttgtggatgttttcagtgtttttttcgtggaatacttctatatcctgatggagagctaatgcctaattgtcctatttatgaccaggtgtccctctcactggaaactcattttcactggcagacacccttgtggctcttgtctgactagtgtgtccagttcattcctaccaagataaccactctttaagagagccttgtccagaaaagaagttaatttcacgtatgtcagtcacgcgagacgcaagtaaaaaaaaacacgtaatagaagtagttttattacttaaagatccagagagaagaaggaaactttcctcacaggcctaacgggagaaggggcagccctcagagacatgcatgctcaaccagtgggtgggtagcaagggagagtgagtgacagccgagaaggccgaagcctttactggggtacacagcatttcctaagcagggagtaactgattgctgggtttaaagcaagcaggcatgagttcttgggagttatgttgtattgagaggtgttcactactgcaagtctgcagtccatgtggggtgtggggatcagtgggataagtcaaacaggttgtatctaggtgctccacaggaaggtggaaaccaagaggccaaatatctggattgaccacctgaagaaactgggagaggagaactcgaaattgtgttaagggtgactaagccctgcttctggtatgagaaagttcaacttatattgaaaataaacactgaggcaacataaaatcataagaattcactacagatatttgcactaccatgttcattgtagcattattcacaatagctgagatatggaaggaacttaaatgcccatcaatggataaacagataaatatataaaagggatataatgtgatatatatgagccacattatctatataaaatggaatactatccagccttaaagaaaaaaggaaattctgtcttttcaacaacattcatgaacctgcaggacattatgcaaagtgaaagaagccagacacagaaagacaaataccacgtgatctcactcatatgtggaatctaaaaaagataaactcatgcaagtggagagtagaatatagctaccttgggggtaggggatggggaaaggggagattttaaacacaagatattttttaaccttttgcaggaaaaatcttggaattgaatttaaaagacaactgggatggcataaataatataggtcagtctcaaagagcacgtcattagtaaggaatagatatacagtttagtctttatgtattctagtttttcagttgaatggctctgaaatcactccttttttccagttgtcttgtaaattttacccttagccccatggaaaactgaaaaaaaatcacatggctcagtaaaacccattccctttattgtaaatataactcacagcatcttttcccatatttgtaagtgataaattcactgtcatcacagtaagactataacatcatactgaagatatttctgtgaagagttttgtactgagaacaccacaccaggacaacttgaagggcattaattgcaactttgggatttatactcccaaaggccccagtcaatgaaagagtatcccattattctttttggttccataaagattccatttactctgggataaagggtccatcccctgataccttgaatgctctaaagtattcccacattctgctaaaaagcagatcttttggacaaactcaggctctcttttctgtagcaatgacaatcacagttatttccagactctgttctccatagttagatttaaaacattggcaaaaatgttataagaaggcaattaggttgatgtttctaggttgcatggcaaccagagagccccttcatcagtttatacatgatgaggtcgtaggccaggtagagagtgacagggaacagggacaaacacaggaaggtcagtactgaaagaagttggcgcacttcttaaggggtgtacagcttctgtatttcaaaattgcaggaagtgtagattttaaatgttcttactacaaaaaaatgatgtgtgtgaggtgataggtacattaactagcttaatataatcattctatgatgtatatacatatcaaaacattacaatgtactccatacatatatacaattattactagtcaatgaaaaagtaagaaaacaaaccagatatagtataaaggaatgaatatgacacgaattgggaaaatgtctcttagtaataattggggaaagaagagacactcagccatccattttccctacagtgtttgatttaaaagaagagagaagatattttattccatagttcataaaagctacatttgatagggtcttcatttccctcttttcctccaagaagaaaatcgaagctgcaaacttttctctacgtgagttctgggtttttttttttttttgtcccttatttcctatcctttttatcgactctggaagaatgctgaaagatggtttatacaacagaaaaatatcagatttcaccttttaattactgtagtaaggaagtcaggcagctgcattaggaaagaaaattatacctgcattagcaaaagtatccacaacatttgagttcaagtatcttacagaatattacctttcaacctagcgaaatttttaaaaaaattcttgcaatttttccatgatttctcaaaaggtaatgatcatttcattatcaacaatatggaaaagtgtacagatatctttgtacctgtctggagcatctgcacagacttggcccaagttcaacgttcctagctctccagctgtaactcaactaattaggcaaacccttacatctttttcaagagtcaagattagaatatttgagttgttaaaagtttttcaaaacactgaaggtgagttgggtgtaaataaatttgtcttttgtcatattttatcagagagtatgagaggaagagttggctgtggcaggaggggagcagaagggggatggcaatgctatttaggaatattgaagaaaacccagaaatacaaattataagttgtgactcagaatttaaagtatagttcagttattggcctaaagcatataaaattttttagaaaccacatttaagtcttcttgtccctgtctaacaatcctgtgttatacattctttcaatttcaaatgccacattctgacctcctcttcactgttgtgcctcaaagcactcttcctttctctcttacacctcccggtgtttttgttagactctgtaatctttctgtcttccaataataattatacccccatgtaactttggaagcactctatcactgatatctctactctatttcactttattaatcagctttgcttatattgtgaatttttataagttggtgtgtgtgtgcatgtctgtttaaaccttcatttgcatgttattttattcgtctagaaataaactgctagcataaataaatgaatatcatttaattctttctataatcatatccaattatttcttttcagttcatattaatattttaaagtgactacctaattgctctttaacatgggaagttcctatctataagtaagattattatggctgcagttattcctttctctgtaactgcaaaattggaaatagtctgaaaatgcaaaaaaaaatcaatttaactttttaaaataaaaaattattttcttaaatattgtctttctgattatggaatatcttagtcttcatttatccaaatgttaactcaaggatgtatataaaagaactcagtaacttgaaaagctattacttgtatccacagctggacaaatatctcaatgaagcatacaaaggaaactgtataaaaattctactgccataatggtgcacactatctggaattgggatacttttttctccaatctgtttgcaagtgagcagttggcaatgcatggacagactttgagtttatgcgattctttctttaggtacaggaaaaataagaatgttgatgaaaaaaaatgcaagttttgaagacttctttattctacttggattttctaactggcctcatctggaagtagttctctttgtggttatcttgatcttctacttgataacactgataggaaacctgttcatcatcatcctgtcatacctggactcccatctccacactcccatgtacttcttcctttcaaatctctcatttctggatctctgctacaccaccagctctatccctcagttgctggtgaatctctggggcccggaaaagaccatctcttatgctggttgtacagttcaactttactttgttctcgcactgggaaccgcagagtgtgtcctactggtggtgatgtcctatgatcgttatgcagctgtgtgtagacctttgcattacactgtcctcatgcaccctcgtttctgccgcttgttggctgcggcttcttgggtaagtggttttacaacctcagcacttcattcctcctttactttctggatacccctatgtagacatcgcctagtggatcacttcttctgtgaagctccagcacttctgcgattatcatgtgttgatacctaggcaaatgagctgaccctcatggtcatgagctccatttttgttctcatacctctcatcctcatcctcacttcctatggtgccattgcccgggctgtactgagcatgcaatcaaccactgggcttcagaaagtgcttaggacatgtggagcccatcttatggttgtatctctctttttcattccagtcatgtgcatgtatctccagccaccatcagaaaattctcaagatcaaggcaagttcattgccctcttttacactgttgtcacacctagtcttaaccctctaatctacactttcagaaacaaggatgtaagaggggcagtgaagagactaatggggtgggaatgggggatgtgacagggaaatcatgttggctgttgtttttcctagggtcttatccattttgaaaggttgtttccctgcttctttgtgatttgtgtttcatctaacagctcacaaaacatggaatagttcagttcccccatttgttgctctgtttaatatttagttctgaaatattatgttgagataaaggttttgattagtaccattttgttcttttacaattctatatttatttccatgaaaattgtggactgtggtttcaacataaataaatgtgtgtgtgaataattatgaggagattatttaaaaaatattggcaatatttctgacaatgtgctaaattatgaactgaccattgatatgtataggaagagaagggcaatattgcaaagatgtaggctgaagaagtttttggttattaaataaaccttaaatgaagctaaaaatagtcacagcaaagaaaaatagtaaacataatgaataacaccatttattatatggtaaaggatatgtcataattttttggttgaagttcactttttaaagacactaaattatataatttatcctgtaggtctgcattcttgtcacattgaacagtaaactaatatctctttaaaatggctgattcgttcatctgtccatttattcattaacttattcttcattagctaaatcttactggacatgtactctctcccagtttgtgaaattcttggtaacatgtataaatataacatactttgtctgaacagaatgcactctctatcgggaaaaatggcaacataagataaaagatgaagtatctgtacatggcttaatttgtcactggggttaatgctaataaattaagatagcttttaaaaatcagaaacaatatactctgattactcttcagattgtatacatctttcactttttaaaaatcgaaagcaaaacaataagtttgataataaactctgataataaattcatagctcctgtaggaagacagtgctattaaatgaaacaaagcagaatatgtgcttaatttgctttagttggcctagttaatgacatattaaagatagcttaaaactcttaacatccttgttctttgctgaatagcattattaaaaaaatttctttattttgattttattttttccagctttactgaggcacaaataaaataacatatatttaatgtgcacaatgtgattatatataaatcaaaccaaattgtgaaattattaccacagtcaaattaacacatccatcatctcacatcgttactgtgtgtagggggagcggggagggtcaggacacttaagatctaatctctaagcaaatttcaagtatacagtacagtattattaactatagtcaccataatctacattagatctccagaatgtattcatcttatgacagaaagtttgtacaatttggctgtctctccacttcccaccctccagcccatggcaaccaccattctattctctgcttctatgggttcagtttttttatttttttgatacacggtctcactctgtcacacaggctggagtgcagtggtgcgatcttggctcactgcaacctctgcctcccggcttcaagcaactctcctgcctcagcctccccagtagctgggactacaggcacccgccaccacgcccagctaatttttgtattttagtagaaactagttctcaccatgttggccaggctggtcttgaacccctgacctgaaatgatccacctgccttggcctcccaaagtgctgggatgacaggcgtgagccactgttcctatccgagttcaatttttttagattccacatgtaagtgttatcatacatcttttgtctttctgtgtgtggtttatttcacttagcacaatatcctccagttcatccatgttataacaaatggcaggattttctttttattggctgaataatatttctcgctgtgtgtgtgtgtgtgtgtgtgtatgagatcacattttctttatccattcctccatcaatggatgcttaggttgtttcttcatcttggctgtcatgaatagtgctgcaatgaacatgggggcatagatacctcttcggaatacttacttcatttttcttggataagtacccagtgggattattgggatcacatcacatctcacacagacttcacaaaatatgagaacatagattcctcctgcctccgtggaaatcttaccatttgtaatatgtcatgtgtcactccagcttctcaagatctacaagactcttttcttttcaaatttattgaagtataatttatgtacaaagaaatctacacattttaagtatatagttcaatgaatttttttatattttctttttattgtatttttgttagacatcaaatattggatttaataagctatcggaaaaagtgtataattataatcctttatactgtaacagtactacacaacttataaagcacattaatatattttgtttcattagaattttggtcatcatagaaaccctaaagctttgttgactattagcctcttgaaacaaaagaaaaataagatataaacattattgttcctatgttaaagattaggaaattgagtctcagagagattaagtagtcttgtctaaatgcacgcactaacaaatggcaaatttgagtctcaaagacaggtttctcaatatcaaattgaaagaatagttcagtgagtttgacaaatgtataattgtgtaaatgccaccacaatcaagattataggacatttctattactccccaaagaacttccgttttgtagtcaactttccccttttagtcatagcctgaggcagcattaattttctctaaatgtacttggtttttcccacttttagaatttcaaataattgcaatcatgcagtgtgtaatctttgggtgtggcttgtttcatttagcatgatgtttttgacatttattatgttgccacatgtatcagttactttttcctttttattgcttgttagaactccattgtacgaatgtgcgacaatttatccatttatctgtgaagggctttgggagtatttaaaatttttggctattatgaataatgctgctatgaaaatttgtatacaagtgtttgtgtggatgcatgttttcacttaatttgggtaaataccttttatttgtacctctccaggaggaccacatgcttagtgtatattatctttatgagatactgcaaaaatgttttcaagtggctgttctattttcacttcaaacagcagtgtatgagagttccaaatgaactcacattctttctaatacttggtattgtcagtttttatacttttcacctctcaagttaggttacctgtggctataatttgcattgaggggtgttgacattgaccatcctcttgtgtgcttttcatatgcttcatatatgttattttgtgtagcttctgttcagatattttactcactttaaaaattgggtcatttgtcttcttattgttgaatttgaagttctttgtatactctgaactcaagtccttggtcaaacaaatcttttgcaaatagaatactgtcatatctttcaaagagaaaaattttaactttaataaaatacagtgtgtcatttccacagaaaaagcctggtggcattttgattggggattgcattgaatttatagaccaattggagaagaactggcaacttgacaacattgacttttctgatctggggacatgatatagatctccatttacttacatcttattttctttcagaagcatttgaggttttcattgtatagctattgtccatattttgttaaagtcacctctatgtatttcatgtttttagataccactataaattgtatagaaatatgactgatttttttccatcgtctgttttattttattttattattatttaagttctagggtacatgtgaacaacgtgcaggtttgttacgtaggtatacatgtgccatgttggtttgctgcatccatcaattaatcatttacattaggtatttctcctaatgctatccctcctgcatcccccccaccgcccccacaggccctggtgtatgatgtttccccccaggtccaactgttctcattgttcaatgcccacctatgcgtgagaacatgtggtgtttggttttctgttcttgtgatagtttgctgagaatgatggcttccagcttcatccatgtccctgcaaaggacatgaacacatccttttcgatggctgcatagtactccatgttgtatatgtgaattttctaggccttaactccaactgagcttcccatctacaatgctttaatagtttgtgatctactctaattcacattcctcccatacaaagcactcaaattaacagaagctcaacagagatcatttagtgtcttttattccttttgattcctcagatgtgactttcaatgtgttttatttatctgagtgtgtattgtagagaaaaaagttgagggttgcttccttagaaatactttgctgtaattaaatcatgttatgccagctgtattttcacaagttactaacatcacacctaaaaatgttaacatttgctggcacccagtagattggcaggggccaaaaactctcctacaattctagttaccaaaacatgaaaaatattggagcttggtacaatctcctacagaccaggatatcagacatttcctggattttgataactgattgaattctgctagtccccacaggttgtaggatcactggtcaaattcctctccaataagatagagaagtttagacatatgattatatgactatttaatcatatttatcttaaaaataatatttaatatattttaaagtaaactggaatgatatataccaagctcatggtagttgtctctggatttagtgttgggtcagagagtgacagttgaaggggatatgaactttatctgtgatactttatgtgctaaaaattctgaaaataaaaatgacaaaagttatggttgatgattctgaatgatgggaacataagggtttatttttaatattttaaatatctaaaataaaggatgaagaaataatatagaatgacttgttaaaatatcacttcaaattaaaattcactataatggtaatagcagctaacatgtattgaatgattatgcactaggcatcgaggataatgtttacgtatttttcacatggagttttcacaacaatcaagactactgaagccaagactgttttcagttgcttcacataagtggacaggaaaatacctgatcatgctcttaaaagtactgactttaaaatataattgtattgtaaatgtgacttgattttcataccaagactttgtctggtacacatggaatatatcacctagacacaatgtaacaattgaaaaatcttcattagtttataaactcacgatgtgcttttttttttaaacatgggatgtaggctagctatcacagctaatttagcttttttatatatttctgcaaagcttttaacaagacatcaaaagaaattattgataacaatattttggaaatattaaataattttgttaaaagttttctgagtttggtagtgaccttctgagtatagtttgaatggtcttcaaaggtaatttttaacacttttgcagggctgaacttggccttgaattttagagatgttagacacaattaaaaattcaaattaataaaacaaatatgtataatgtagtcattatatttccttttaaaaaatgtttcatgccttttcccattcccaaattagactacctaacaagctatatctcaaatttggcctctagcatactgaagaattggggaagaggtttcaggtaactcaagataacccattcccttccctgcagatacagctcaaagtatttttctctgctatggctggactatagattccttgtcatcctcgtacaacaatgtggcatcatgccaagaacatcactgagaaactgttctaaccaggataactccttgaagggcattaattgctactttgggatttaccctcccagtggcccaagtcaaggaaagcaagtcacattcttttgtttccaaaaagggcccattgactctaagataaagacccatcccttgatacactgaaagctctaataagtttatcttttgggtaaaactaaatttttttagtagactcagagctttctcttctgtagcaatgatagtcatagctacattcagactgttttcctaattgatgtagtagatgagggaagtgtaggcatttatgttggtgatttcaaggtgatcaaaatcagagatcagatcagtctgtgcatgatgagggcatcagctaggaagacaatatacagggaatgtggacagatacaggaaggacagagtgaaaggcattgtttgagtactgcttaagtactaggtaatatataaagaaatattatggtaagaataaaaaaacttggccagtgacatggggatggggaaaagagattattttctccctccgttatacctgatttccaaaactagagaggatcacttattcctagtccatgaaagcaacttttaacttttaatttttgtgggtacacaataggtgtatgcatttatggggtacatgagattttttttgataatttctttctttttattttttgtagagacatggtctcacttcattgcccaggctagtctcgaacttctgggctccagagatccgcccaccttggcctcccaaagtgtcaggattacaggtgtgagccacggcacccgacccaggtatttttgatacaggcatacaatgtgtaataatcacagcaggctaaatggggtatccatcacctcaagcatttatcctttctttgtgttaaggataacttaaacttttgatatggcttttgataaggcttttaacttttgataaggcttttattttctgctccaccaggaagaagaaaattaacccagaaaaattcctaccttttccttgcttgcatctggtaagtttttgtttgtttgcttcttatctcatatctcattctaacctctctatgtaagattgctcaaagatgggtcatgcaattggcaaaggtatctcacagctaaatgttgttttagttaatgtaataaattatcgaggcaactgtacaagaaagaagaaaattttatctgcatgagagaaggtaactataacatttgtgttcatatttctcatgatgtattatctcctattctagagaaatttttaaaaatctcttggaaaattttcatcttccctcaagggctgtgacctctaagtcaagtaatcttcatgatttactctttgactattgctgctttttgattcagctatagcttttaaaattttcttttaaaacaatgtgcagactgattttcctggatggttgtttaagttgttgaaagtaatctagattagtgtaacaactggctaatgattatttacattaccaagtctgttaaaaggtctgaggtcaatcttttaatcttgggaccaaactgaatgttccaaacttttctgctgaaactcaaccaattagctactcctgacatttctttcaggcattgaatttataaaacatgagcgattaagagacccctaaaagaggcaatcacaggtggccccacaatgatttctttcttcctgtgccatagccaattgggaggtataagaaaaataaccgactgtggaaggaatgaaatagagggcatgtggcaaagctggaagaggcaaagaattcagagaaaatggggtatttaaatggtgggttgctatgcctgacacaataactatataacaaaaataagtatcatttttttctatgaaagattgaaaactcactggagaaaaagcatcacctaggagtcataactatttgtaagatatattttatttttaacaaaaaaagtaacatgagattcactgggcacaatgtattaaatgatgaacagccacttaatgattcattaaatattcagaactctctaacttggagaataaatatgtactaattatagctcatgctcagaatttatatactatctaaattattgtcctggagaaaaatacatcatgtagaaaccttcttcaggccctgtggttcagcttcttgaaccctgtgatagacacacctgcaactctaagaactacactcaggttctcctccattttcctgcccctcccacttttccttccttctctgttctctcactgaatttttatcttcctttcctttctgtaaagtttgaatcttttcaaattcagttgtagtcacacatcctttagaaagcattctatcactgttctccccagatttttagcttagttcgtatcatgaatacccatatattgatgagcaagtgtctgtgtcttctctacttgtattcaatttttcagtttagaaatacattttgagtccaagtaaacaaatcacaagataagattcttatctaattgaagctaaacattttttctttaggtgaacattttgaaatgactaaattcaatattttccacatatcttttcatccatatgtaagattattgtgattgcaatgattacgttttccacaatcacatttaagaaaataacctgaaaatgctgaaaagaaaactaaagttccttatttattaacaaagaaagattttgtgttttatggaaattatcttccttagctaggttaggaatttccttcaattaccatttacctagatgtcaccctaaaatgaatgagaacttgatagttatttttctataataaggcaaacatctaaataaaatataaaattaaaaaattattttgtatttttgtgactttttattatggtaaaatttcaaacttagagaagagttgcaaaaaagtagtacaaaagactaacatttacccttttaccagattgagtattagtttacattttcccccaaagctttgttatatcatctatcaactatctatctatttatctatctatctatctatctatctatctatctatctatctacctatctatctctttttctgggctagttgagagtaagttggagatgacacgttcctttatgccaaatactttattcagtgttttttgtctaaggaaaaggatgttactttacataagtccagcacagtacccaaatcagcaaacttaatatgggcacaatattattatctaatccatagtccacactgagatttcttaaattgtctcaataattttgttaatagctagtttttgaaaaaatccaggattgtacactgagaaatcacatctcactagtctcttttcatctggaccagttcctcaccctttgtttttctacttaaacttgatacttttctgaattgtataggcaagctatttctctcaatttgagtttttctcatgtgtcttcattattagaattagtcttcattattagaatttttaacacaaatatcactgaagtgacagcatgtcctgttcagagcatcatcacagcaggttcatgatgttggtttgtgcaaatacagttgatcttaagatcaataaaatcactggttatggtggtgtctgacaggtttttctactacaaactttactgtttttcagtttgaaattaactagaaagttgtgaggagatattttagactattttagatatttgtacatattctgttccccatcaaatttttatccactagtttttgcaatcatttatgtttttcttaacaccgtcaccccttctatatttgttaattagggatctactgtaaggaatagctttatcttcaccattcatttatttattcttttactttttatatcagtatgagctttataattcttcttttgttaaattcattactactaatggttaaattgtcctacaattaaatgatggcaagcccttcaaactggcttttattttttattcatgtgtgctgatatttttggatcatttgtttactcgttttttgagtttacctttcttttttttctctcaggtaataggaaatgaatgatgatggaaaagtcaatgctagctctgaggggtactttattttagttggattttctaattggcctcatctggaagtagttatctttgtggttgtcttgatcttctacttgatgacactgataggaaacctgttcatcatcatcctgtcatacctggactcccatctgcacacaccaatgtacttcttcctttcaaacctctcatttctggatctctgctacaccaccagctctatccctcagttgctggtcaatctctggggcccggaaaagaccatctcttatgctggttgcatgattcaactttactttgttctcgcactgggaaccacagagtgtgtcctactggtggtgatgtcctatgaccgttatgcagctgtgtgtagacctttgcattacactgtcctcatgcaccctcgtttctgccacctgctggctgtggcttcttgggtaagtggttttaccaactcagcacttcattcctccttcaccttctgggtacctctgtgtggacaccgccaagtagatcactttttctgtgaagttccagcacttctgcgattatcgtgtgttgatacccatgtcaatgagctgaccctcatgatcacaagctccatatttgttctcatacctctcatcctcattctcacttcttatggtgccatcgtccgagctgtactgaggatgcagtcaaccactgggcttcagaaagtgtttggaacatgtggagctcatcttatggctgtatctctctttttcattccggccatgtgcatatatctccagccaccatcaggaaattctcaagatcaaggcaagttcattgccctcttttatactgttgtcacacctagtcttaaccctctaatctacaccctcagaaacaaagttgtaagaggggcagtgaagagactaatggggtgggaatgagcctgtgtatgtgtcatattaacaatataacagagtctcccctcacaatgattcatccttctatttatttatcaaccattcttttattcacgcactctgttagcacttgctgagcatgtactctaacaaggtcgtggagttcctggtaacaggtaggaataaaacacagtcagcctaaataccattcacttgtggagaaaacagctatgtaaaatcaagataaaacatctatagtgatgtttttccatggtacaaacctaatgtatccaagacagacatttctcgattgaaaataaggcatgaaatttgttgtaaatcttgataaaagcgaagctgtaaatcctatgaaaagatgatactctcaatttaaaaatctctacaatatgtcttttaatttcttgctttttgggcagaatacttttgtcttctatctttagtttagttaaatacacagcaaaatacttcaaatccttttctccaacaatgcttattctttgtcggatagtaaattttgagaggaattttggtccatattctttcatatccagtatcaatagtagaacaataagttttatgaattgtagtaagagaggctttgaaacagtatagcagaagtcagcatctgagatccctcttttttgcaaggcagtgagaaatatataggaagtaaaaggagctggtaaagctgagctatggagcttataaacaaatggtcatcataggctaggtatacttaggtgaggtaagtgcttggagcaactgcattacctaaggaactaaggaaaacatttgaggcaaatagagaggctctgaaaatgacttgaagccaatgggtgtatgaaagaattatgtgaaaatatattggaaaaattttatgatagaaactgtcatatggaaaatgatagcttatttttattttaaagcttgatctaatttgagtatttatggttaataagtatattatgtatgtcaatatatgtgtttcaaataaagaaatctattttatagaagtaatcattttgttttatatattattgtcaaccatcttcatttgaaataattgcgctatacctagagcaatttaaactgacagtcatagtcaaatgaagcggaaaaatggctaaaggagaattcagtataaagtaacgtacttgcaatgcctgagttttctctataactcaaatgtcagctgtagcttttgaggcctgtgagatttagatatgattgattcacacactatttcctaaattattataaaaataaaaacgcatctcagaacttccctccaatttctagtgtgacttgcaattgcattgattctgctgactttatcttccttctgcatctctgactcttcctttatttctaactaggcatgaaaaatatgaggcatgtgcccttgtccttaaccttacccaagaagtgaagaaccaagaataatgtatgtaaaatgacttttagcaagaattgggaccacatacggtaaaacatcacataaaaacacatttttaaaaacttaaagaacataacttcgccctttgaactgttttctactatggaaatcttacgatttggagcacttacggtagcatcctggtttctcacctactcaaatatcccccccccccatctttattaaggataagtgaaaaaaatgtatttatttataatatacagcataatgttttgacatatgcataattatgcaattattactcaagctaattaacagatcattaactcacatacttacctgttttgtggtgagaacatttaggatctattatcttagcagttttcaactatgcagtacagtattattagctatagtcaccataccgtagaatagatctcttgaatttgttccttccatctgaaactttgtaccctttgaccaatatctccccattttccctatttctctccactgctaacccctgacaagcatctttctgctactctgtgcttctatgattcattttatgtcgatttcacatatgagatcatgcagtatttgtttttctgtgcctggcttattttacttagcaaaatgtcttcaggtttgccatgttgttgagaatattaagacttccttcttgttttcaggcagaatagtattctattatatatatactacactttctttattcactcattcattgacagacacttagattgattcaataccttggctattatgaatttgctgtcataaagatgggtgtatagatagcttttcaacatagtgatttaattcttttggatatatacctagaatatatacaaatggatcatacggtagttctatttttattcatttatttttaatttatatatttatttatttatttattttttatttatttatttatttatttttattatactttaagttttagggtacatgtgcacattgtgcaggttagttacatatgtatacatgtgccatgctggtgcgctgcacccactaactcgtcatctagcattaggtatatctcccaatgctatccctcccccctccccccaccccaccacagtccccagagtgtgatattccccttcctgtgtccatgtgatctcattgttcaattcccacctatgagtgagaatacacagtgtttggttttttgttcttgcgttagtttactgagaatgatgatttccaatttcatccatgtccctacaaaggacatgaactcatcattttttatggctgcatagtattccatggtgtatatgtgccacattttcttaatccactctatcattgttggacatttgggttggttccaagtctttgctattgtgaataatgctgcaataaacatacgtgtgcatgtgtctttatagcagcatgatttatagtcctttgggtatatacccagtaatgggatggctgggtcaaatggtatttctagttctagatccctgaggaatcgccacactgacttccacaatggttgaactagtttacagtcccaccaacagtgtaaaagtgttcctatttctccacatcctctccagcacctgttgtttcctgactttttaatgattgccattctaactggtataagatggtatctcattgtggttttgatttgcatttctctgatggccagtgatgatgagcattttatatatttaatttaacttaattttttgagatggagtcttgctctgtttcccaagctggagtgcagtggtgggatctctgctcactgcaaactttgcctcccgggttcaagcgatactcctgcctcagccttctgaatagctgggactacaggtgtgtgccactgcaccgaggtaatttttgtatttttagtagatatgcggtttcaccatgttggccaggctggtctcaaactcctgacctcggatgatctgcccacctcggcttccaaagtgctgggattacagttgtgagccaccctgtttggcaatatttttaatttatttaggaaccttcacagtggttttcctcatggctgtcctaatttacatttccaaaaacagtgtataaggattcccttttctgcatattcttctcaacatctgttatcctttgtcttttttcataatagacattctaactgatgtaaggtatgaggtgatatctactggtgcgggcctggactttaggtccactggagcctagagcagtggggaccatccccctgaagcctggagctggtgtggtgctagagtggaacttactgccttgggggctggtctggagtccgggtttatggggcccagcttatatgtactggtctggaggctagatccttgggtactggcatgggtcttggggctacagagtctgacctggggggccaactggcactggaaagtcctattttgccattttattgataccacttctcactatctaaattctttttttttctttttaactttctgtgctcttttctcctttttctcttacaaaacatatacattttcttttatatgtatagacttttcattttcttttgggaggttataattatagtatatctaatgttgaatcctagccatattagcctgtgctgtgtaatttgtaatctgagaaatagatcagttaccaaaaattccaccaaagattaacactggtattactgtttttattgttttgtacttttcaaaccagtcgaacagactttatgcagtattatcacagataggacaacaggaatgagttttctcactttatcaaactgaagggaagaaaataggtggcttgtataacttctggcaacttgtatgtgaaaaaatcagggtaaggacaatacatttttagctctgacaacccattcctatgtcaacaacactgaaggcaaaatagaagccctgagatgctccccttgtcagccctaaaccttatgaaaacatttgtgaactgggatttccaaagcacacatgaatttgtatggcaagcaactttactgaagaactaacagtgaagccagctttttcccagataggaatgaaggctaacctcatggaagcatcagcttcttttgccctgtaaatttctcctccccattcagacagatgtctcccagtctttgtccactgtatcttatacttgttgctgtgcagcatattcttatatacatactcaattatcttttcttattttaactctgcagtacagaattgttggcacaaatatgtcatccaggtaatcacagaaagtagctctggcttccagcctaggtacactccgtctgtattctgctatgtagctcaggttcatatctcctattttacatatgtgaggctggaaaggtgattagtgatcatatattatgaaaacactacatgatttcaaacataagtttcaaatacaagtgattatataccaagtatcatccaacaatcacaaaaaaactcatggaaaagttataaaaatagtagaaagacttaccattgagcttcaccagatttaaaaaatcttagcatttcaacatgtatggtttatcattctcactttatactaatgttaatatgcatttaaattttttttctaaactattacgctgtaatgcacatgttcccctaggttgtcacaagaatatttcctaaaaaagtatctaatccaggatcataaggtggcagtgtgatgtctcttttttctctttaattgggaaccattcctcagtctgtctgtctcttcaatgcaccttatagttttgaagagtgcaggccggccatttactttaacaaaataattgtttttaacaaataagggggatttattgcttataaaaccaaaaagttcagcagtagtgtgggcttcaggtatagcttgatcagtgctctggatcaatatctctgcagtttcctcagctatgtcctcttccatgtattggatttgtcatcaagttgattcccctcacaatcacgaaacattgtcagcaataatcaggcctatatgcttccttgttcacattcaagaggttgaatatcatcctataatcaatgaacaaaaatggctctttatacagagcttcatactgacgcataagttgtctgcacattcctggcaacatgtttgggacaaggggcgaaaatgcaatgattggctgagattaattgggggccacttctgaagccaggttttcagtgaaagggccatatatgcaaagccatctctcaaatgcacaaagagcagataaatcaaagaaggaggcagacaaatctagcttgttggtttggggtgatttactaaaggaatttacagacatatatgttgtcttgggtggccacaacatagttagattttgcactgcagtcctccagatctagggcttatcttttgaggaaagtatacttgctctgaaagaaacatgtaggtagctacaggtgccatggactatgcttcctacaacagcgtcaagggttgttttggaggaaacttacagtgaatacatgttcctacataaagagtaatatatcaacttaacatcttatagggactcagggttattcagaagttacacggcagattagcatttaaaataaagtcactcttgctcctgcactgggggtggggttaatttcatccaaagcacatgctacacagtgtaggtgagatgggataactattgggaggcaacagtaatatcatagtctctattgtctgcatgagaaaactgaccacaacagagctagtaagtgatgaagcttggattcaaatgtgggctttctaacttcacagtttgttcttaatcactaggcaattgttcctccctatagacatctgaactctttaaaacaagaaggtgaggattcagtatgtacatttcttggctctttgcaacttgtcatgggaaggtcttcattttctcctattctttgttttaacacctaatatttgaaccacactgaatttatcttactctcttactgtcctgaggatgttcacaagaacttttccttcaaggttaaaatgtgtcacttatacctcaaccaaacatttcatatttgcagcaattatgcttattcacataaggttgtaaattcctcaaggctcaaccaatggctgagaagtgttttgggccactgtacctttaacaggccattggtgcatgaagaacatcagcgacaatgtcattctcctagaccactgggcagtatctgccatatgtaggccagtcgttattttttattaccattattactaatttttactattattactatagtggtttccaaataatgattcttaaagttccatcattccttctaaacttattagtttgtgtggtaggctaaatacttcctctccttgtcgcaaatgatcacaccctaacctctgggacttgttattatatgttactttacatggcaaaaggatttttatagatgtgattaaattcagaaccttgagttgggattattatcctgaattagccaggtgggctgacatagtcatatgtgttcatataagagggaggccagaggtcagagagaagatagtctgctgctgactttaaagaaacaggaatgggccatgagccaaggaaaacaggttgcttctagaagctggagtagttgagaaaacagattctctctgaaagcctacagaagaaatgcagccctgtagacccaatttagtattcctatctccagatacatgatatttttgttattttaaacaccaaatttgtagtaatttgttatagcaacaatggaaaactaatagagttggcattctatatgaaggaatagctttcctttttcctgtgtgtgtgtgtgtgtgtacgtgtgggtatcaggtattatttatctatgtgtctacctatatatcataatatggtcttatgcattattatttcattctgtcattattttgatgctgaaatggtcactgttttggctagagaggaccccttccagttggctcatatatcttttttatatgtctccatacttcttaaggccaagatgggcagatcacaaggtcaggaggtccacaccatcctggctaacacggtgaaaccccatctctattaaaaatacaaaaaaattagctgggcgtgttggcgggcgcctgtagtcccagctactcgggaggctaaggcaggagaatggtgtgaacccgggaggcggagcttggtgccactgcactccagcctgggcaacagagcgagactccgtctcaaaaaaaaaaaaaagaatttcttactgttggcaaactgagacgatcttaacatatctgacacttttctttgggaggaatagataactttgtttatcttaggtcaaatgacaaaaactttgaataaagtactggggtttcctaatgaacaattcactagaaatgcatggaatagataacaccaaggcatggtaatattgttgacaaatatttatttagttataacatcacatttctttacccactcaggaaatggaaagtttttgtattgtgcttgagagtgaggcaatggtgaagaacagtgactggctatgggtttggggagtcatttggcaggagtgtaaatccttgaaatttgaaaatctttcaaattatcttgattctcctcaacaaaatactagcaaaccaaatcgaacagcacataaaaacctaatttcttagctttttgatgaaatagctgtttcctcaccttttctatcgtctagaggtaacctacattccttggctcatggcccattcctctatatttaaagtcagcagtggagtatcttccctttgacttctggcctccctcttatatggacacgtgtgattgtgtcagctcacttgcctaatccaggataatatccccatctcaagattctgaatttcatcacatctataaagtccttttgccatgtaaagtaacgtataatcacaggctccacagattagggtgtgatcatttgcatcccagggaaaaagcctaccatgatcccttgtgtcccagggataaagcccacgatgatcaagtaggctttatccctgataggaaaggttggttcaacatatgcaaatcaatacatgtgattcatcacataaacagaaatgaaaacaaaaaccacatgattatctcaatacacgcagaaaaggctttcaataaaattcaacatcccttcatgttaaaaaccctcaattaactaggcattgaaggaacatacttcaaaacaataagagcaatctgtaaaaaacccacagccaacatcatactgaatgggcaaaagctggaagcattccccttgaaaactggcacaagacatggatgccctctctcaccactcctattcaacatagtactggaagtcctggccagagcaatcaggcaagagaaagaaatgaaaggcatccaaatagaaagagaagaagttaaactattcttggtagcaaaagacatgattctgtataaagaaaaccccataatcttggtccaaaagctccttgatctgataaacaactttagataagtttcaggatataaaataaatgtacaaaaatttagcattcccatacatcaacaacatctaagctgaggcctaaatcaggaatgcaatcccattcacaactgccacaaaaagaataaaatacctagaaatactgctaacctaaaaggtaaaacatctctacaatgacaattacaaaacactgctaaaagaaatcagaagtgacacaaggaaatggaaaaaacatcccatgctgatggatactaagaatcagtatcattacaatgaccataccgtccaaagcaatttatagattcaatgcaatttgctatcaaactaccaatgacattgttcacagcattagaaaaaaactattttagaatttgtatggaattaaaaaagagccctaatagccaaggcaatcctaagaaaaaagaacaaagttagaggcatcaccttactcaaatgataccagagggctacagtatccagaacagcatgataccggtacaaaaacagatatatacaccaatggaatagaatagagaacccagaaataatgccacacatctacaaatatctgatcttcaacaaagctgacaaaaacaagcaatggggaaaggactccccattttataaagggtgctgagataagtgactagctccatgcagaagattgagactggatgccaaacttgcaccacatacaaaaatcaactcaagatgaattaaagacttaaatgtaaaaatgaaaactgttaatataaaaactctgaagataacctaggaaatatcattctggacataggacttggccaagatttcatgccgaagatgccaaaagcaattgcaacaaaaacaaaaattgacaaatgaggcctatttaaactaaagaacttctcacagtaaaagaaactatcaacagtggaaacagacagtctacaaaatgagagaaaatatctgcatacaatgcatttgacaaaggtctaatatctggcatctagaaagaacttaaacaaatttataagaaagaaacaatgccgtttaaaagtcagcaaaagacataaacagacactttccaaaagaagatacacatgcggccaagcatatgaaaaaatgctcaatatcattaatcattagagaaatgcaaatcaaaaccgcaatgagataccatctcgtaccaggtggaatggctattatcaaaaagtcaaattattaataacagatacatcaaggctatggagaaaagggaatgcttatacactgctggtgggaatgtaaattaccttagctattgtggaaaatggtgtaatgattcctccaagaacttaaaacagaactactcttccaccaagcaatcccattagcgggtatatacccaaaggaatataaatcattctaccataaagacatatgcacgagtatgttcattgcagcactgttcacaacagcaaatacatgaaatcaacctaaatgcccatcaacagtagattgggtaaagaaaatgtggtacatagaccccatggaatactatgcagtcataaaaagaatgaggtcatttcctttgcagcaccatggatggagctgcaggccatcatcctaagcaaactaaatggaaaagagccaaataccacatgttctcacttataagtgggagctaaacataagaacacatggatactagaaggtgaaccacatgcactggggtctacttgacggtggagggtgggaggaggaagaagatcagaaaaaatacctattgagtactatgcttattacctggatgatgaaattatctgtactccaaacccctgtgatgcgcagtttacctgtataacaaacctgcacatatacccatgaacctaaaataaaagttaaaaaaacctaaaccccaaattaccttcaaccttcatgagtttttacatttgaaagttaaatcgataacttaatgacaataattcaactctctcatgcttatccccctcatctaacccaaaacaaaacaagattggatactgaggtgaggaacctttgaatttttaaatagtattaggtctagcagaacctcagaaagacacgtttacattaagaggactttgactattgatatgggcatgtaagttctttactgccacgttcctagtaattcctgaattgcacatgtatgaaatgacattaattctctcatactttagggttgcttgtcagtgcctagaaggaatacagtctctgtggccagtcttcctggatcaacaagagccttgtagtttcccatttttcatgtgctaatagtgaaaatgtttagaaagccccatctatcctcccacattggcatcccactgatgtgctgtcctggttgctaggtgcagatttaggttccaagcagaacactgctagtgttctctgcagtttgttgtagaatcatagtgtcttggcaaccaaaggcagatctggtgctatggaggacctgcttactgctatgaggtgttactttatagaggtcctggagaagctgattgaggccacgtcaatgttgcaaggagacatgagactcacatcagagttctatggcttaacatgggggatggtggtaagtgcggctctatttggattttgtaattataaaagcccactttatgtagagagaaaaaaaagagtttaccagagaagtttcttctgtagttgaagacaaatgtaatgttttaataaattaggctgattaaaaaagaatatgagtttggcgtgctggctcatgcctgtaatcccagaactttgggaggcagaggcgggtggatcacctgaggtcaggagtttgagaccagcctggccaacacggtgaaaccccatctttactaaaaatacaaaaaattagccgggcttgggggtgtgttcctgtaatcccagctacttgggaggtgaggcaggagaatcgcttgaacttggaggcagaagttgcagtgagccgagatagtgcaattgcactccagcctgggcaacaagagcaaaactttgcctcttgaaaaaaaaaaaaaagtgtatgaaaaggtaaattatttttcatggagtcctgccctgagaacaaggcatcaaatcctctaagtgtataggaaatttgagttcaaaatagatgctttgaaaaaaataaagaaaatgtttttgaaaaatgcaaattttaacagatttagggtatagaagtgcagttgtgttccatggatatatttacatagtgaagtctgagatttcagtgtatccatcatccaaataggatacattgtcctcaataggtagtctttcatccctcaaccctttcccaacttcccaccttttggagtctccaatgtcattatttcattctgtatccacatgtacccattgtttagctcccacttataattgataatatctagcatttggctttctgtttttgagttatttcacttaagccaatggcctccagttccatccaagttgttataaaagacatgacttcagtctttttatggggaagtagtatcacattttagaaatccaatagtccattgatggacactcaggttgattctattactttgctattgtgaatagtgctgcgatatacatagacatgcaggtttctttctgatataatgatttacctttaggttgatatccaataatgggattgctgggtcaaatggtagttccatttttagttctttgaaaagtctccatactgttttccacagggcttgtactaatttacattcccaccaacagtgtatgtattctttttttctctatacccttggcaaaatttgttttttttttttttgtcttgatttttttaatcatggccattttgaatggcataaggtaatatctcattgtggttttaacttgcaattctcttatgattaacatttgttcatatgtttattggccatttatatgtgatctttggaaaaaaaaagaacatcttaaagttcagaatggggccaggtgcagtggctcatgtttgtaatcccagcactttgggaggccgagacaggtggatcacaaggtcaggagttcaagaccatcctggctaacacggtgaaaccccgtctctactaaaaatagaaaaaattagccgggcgtggtggggggtgcctgtagtcccagctactcggcaggctgaggcaggagaatcgcttgaacctgggaggcagaggttgcagtgagccgagattgcatcactgcactccagcctgggtgacagagcgagactccgtctaagaaaacaaaacaaaacaaaacaaaacaaaaaacttcagaatgtattacattcatggctaggtttagaatatgggttgagtcactggaagatgtgttgaatgaagtcttttaaatagtgagaacctgatgccaaaatgaccttaaaactatgtcaaaagagaaaaaccccacttaagacagcaataaaatagggtttggatgagcatttcaatcttgaggaaaacctaacctgtttgcaaaataagcctaaggattggatgacaagtttaccactgggcaaaaagatatttatatccttggattaagtgctaaatgataagaaatcaaaccaaatatttgagtgaacaattgatgaatattcactactatacttggagaagataaaatggatgttgggacttagaactagatcaaatcagaatgagtatcgatcaatgttcagtcaaagggggttggaggaaatttgtttatgcttcttaaaacgcttttttttttcttttttgagacggagtcttgctctgttgcccaggatggagtgcagtggtgccatctcgactactgcaacccccatctcccggtttcaagtggttctcctacctcagcatcctgagtagctgggattacaggcatgcaccaccacttctggctaacttttgtatttttagtagagacagggtttcaccatgttgccaaggctggtctcgaattcctgacctcaagtaatcctcccaatttggcctcccaaagtgctgggattacaggcataagccaccgtgcctggcctcttaaaagactcttcacggacagagaaataaaatataaattaggttatatgaaaaacattgaatcgtgaagcctttaaaaatcacactgaacatattcagcatgaattaagcatttttctagcacgaaaatgtagcttgaaagtaagtaaggttcagaacatttagccaaatgtttaagtaatttctaaactgtattgagaaaatggaatagtttcatggattatatgtattagaaaaagttaattagaaagttttcaaatacacattaagtgatagatacagaaaaaaaaaacaaaattcttagagaaaaaatgaaaaaactgacctgttcttatcaaagacatgatttcccatatttaaaaaagcttgtaataattgatttacaattaagttgactgaagaaaatctcactgatttaagaaaatctatatgaaagtccagatgccagtattttttcctataaaaatcttcatagtcaatattaaggctttgtaaattgagatacaaaattgaagtattatgaaagtactcatgtaacaagattgaaaataaattctcacaaattcctttgtcactaaaacaaaagcactgaaaatttatgctagcaagaatgcaaagtgagggaaactctctttgattgctggaagaaatgcaaagtggtgcaactaatttgaccatttggcaatttttataaagtttaatatagtcttgccatatgacttaacaatcacattcctaagtatttacaccagtgaattaaatcttatgtccatgtaaaaatttgcatgcaagtatttatatcagtgttattcataattactcaaaactgtaagcaacccatgcccttcaataggggaaaaataatcttgggtatttccatacaatgatctatgattttgtggaaattgattgatgaatgaatactattgatcaaagggatggaatgagctactgatacatgcaacaacatgaatatttgttaagtgtatttcactaaatgaatgaagccagacttcaaagtctgaatattgtatgagttcattcataagacatctggaaaaagaaaacctgttgggatggaaacacaccagtgttatccagggcttagtgtaggggagattagttgattacaaagaatacacgcaggggacattttaaatgatagagttgtcttgtatggtgctgcactagtaatatgcaagtctatgatttattaatccccaagaagtgtatcacaaaattgcactcaaatgcatgcaaataaacaagcaaaagtttcaccaagatgcaggaagatcctagaatggtatgcagacagtgacaaatcaatctcacgttatataaatgtgtaagctaacgaccctgaaaagggtagagaagaagtaaatactgactttggttattttgagaaataatattttgattaaaaaatgtcaggctaaagagaaaagtaactgtgcataagtactgtattctaaatggtaatttttttctcatgtgggtacagctaattttgtaattgcttcacaagcatactagtgttgaacaaaaatgttaaaagatgaacagtggcatccaggtttctcactgttggtatgagaagttataggtaaacaagaaaggaaggccagaatgatcatgagggactgtgctagagtcagagttacactgtgacatcatgtttaaacacaagcacgaatacacacggacacacacatagatggacaaatatagaagcaatgacagatatgtgtgtattcagggcttactgtgtgaacacacattacctagccctttctgctgaaataatctagaaacaaagttaccctcacagcagtgtgtgcatgtctgccatgtccagtgaaaagaaccagagatccttggggaaatgtctgattctaagatatttctaaggctggtgaaaaaatatataagataagcctggaggagaaggaccagtaataccagaaatcaaggaggggccttgaagagaaaaggatagcaaaaggatgaagacctgtccaagacccagcagccagcatgaaagagctctcaatggggaaagctggaacaatttcaacaacaaaataaataacatatcactggattataatctgaagtataaaaagtatgagtccatactgttaaatgattgaataaatacataaatggagaagaagagagaaatcttccttactgatctattaatagtctccacttttgggggtggagctcgtgatctccttcattaagtataggctggattcagtgactgtcttccaaggaatagagtatggaaaggtaacaattgtaagtttaagttttatttagtgcaaacactaccttaagcaagtgattaaagtcagcaccatcagtaatgccatgtagatattatgtaacccctgctctgatgggataaaaagggcactttacctctgtggtcacctcttcaaaaattcaaaggcccagtgtaattgatggcagctgtggcctgtgtgcagtggctgctgccatgacgttggctgcagtgggagaggtgcgggtggggctgtgcactcgatggagcccgaaggagctgggaacaggcaaaagcccccaccccttatgagttggcaggcaggtgccttgtgctccccaggctcagttgcagctgcccagctgtggctgcagacccgggtatccctgtgctcttggggtccgggagcaggcagaaacctcaccctcccgggtgcagctgcagctgctcaagatgtggctacaaacctgggcatccctgttctcttgggtgccaggagccctgcccttctgggtgcagttgcaggtgcgcaagctgtggctgtggatctgggcatctccacacttttggggacccgggaaagaacccttgcccccgtgcagactcggaggtgcctgctcctgctgcctggcctctgcctgctcctggcaccagctctgatctcggagcggagttgaggctgagccctggggcttttgcaacctggcctggtgtgtgcatgcttggggcattgctgacacaccagcatcctgctgcctgagccccgctctggactttgggcaccagtaagcaaggaagggaggctggggaggtgctgaaggcagcttggccctggcctgcaggtgaccctcggcaggaacagcctgggtgccatgaacagtggcaggaggcagacaggctcctggacagagagggatgggtccccagtgaggccccaccttcaacccagggaaggcttgaagcctgagagccgggctgccagcctcgcagactggagtgggaatttatgatgctttttctgggcctgcacatggttgcccaagggccaatcagcacctacttcctctactctgaagcccataaaaactcccggactcagccagattgaaaaagatgacaagacaaccagctgcagagaggaggtacccaccctagggtctcctctctgctgagagctgaaaaggcaatggtacggccagctgtgaaaggagctatccacctcagggtctcctctctgctgagagttgaacactggtcaggacaccctggctgtggagaggagctaccctctatgtgtctcctctgagctgttctgttgctcagaaaagctccttttcacctaactcaccctccactttctgcatatctcattcttcctgggtgcaggacaagaacttgggacccaccgaatggcatggctgaaagagcagtcacacaaacagggctaaaacataccctttcctcactcaccacattgcaggcgacaaaaaggagtgaagaactgctgcccttcggggagcccagacctaagagctccctgagtcagggctgtgacagcctctttggctctgtggttcctggtgtctcttagcttctgggcaccactgcattctgcagcatcagccatggaagctgcttgcagtacacctgctccagctgcagccttgcagggagctggtgcctgtgttggtgcctggaactgcctgccctgccacagcaagcatgcctggctgtgtgcagtaggtggaccccacactttctcgctcatacacgcctcgctgctctgcttgcccttggcaggtatgggatccaggctggtattgtgagctgagcacagcctgctaggctgagtgggccagtgggcctgaggaaaacttgggcataggtgccactagggacagaggttttcgctggtgaagtgataccccaaggatcccataacataatcatgagaaaacatcggacaaaccatgattgaagtgcattttataacatacctgagcagtactcaaaattatcaatatcaagaaaaacaaggaaacagattcaggaaactgaaacatgacaactaaatgcaatggggtgttctggattgaattttgcaacaaaaaaagaacattaaagaaaatcctgctgaaatccaaagatagtctggagtttcagtgatagtaacataccaatgttagtttcctaattttgaaaaataaaccagagaaatgtaacattaagggaaagtgaaactgggtaaggggtatttgggaattctccatgccatctttgcaacttttctgtaaagctaaaattatgtcaaaataaagcatgtatgaaaaatgtattacacagatgggaaggaacaagatgtccaactagatgcagccaggaagcaccgctttcactgagagagaccaaattatcgagtaaatcaacataaattggacagatcttaggaaagaaaatgctgagcgtgaagaggcaaagctaaagctgaggctgtagagacagaaagctggggaccctgctgttgggatggcttctgggaaattggcgaatgagggaactgagggaatgctcactcttgtcatggacctctgggatcctagctacaagagactgaatgccccccataaaggtgttagctgacagggggatctccctggcgaaggttaacaccgcttcctcaaccccttcacacacagacacttacagatcacgtaaatggaaactcttcaggggatgagggagaatgcaactctctgagtgtcttggtatcagcaacagcacaggttagtaataagccctgaggcagggaaagtgatctcatatcaggagtaattgaatgtgaatcatggggaaaattgagagatgtattgggatcaagtggtacttcagttttccccttagccaaaatacatcccagaactttctaaatcaactagtgcaatgaactatactgaatttttattcatgacttcattacactactaaaagataaagtctctactccggcttctaggttaatagtagcaaagtataatatgcctatttaaaatggtcctattacctaaaaaagttgatctcatggaagtagagagtagaagagtggttactagaggagctggatagggtagggtgaagaggggaatgaggagagtatgatcaataggtacaaagttagagttagcatgaataagttgtagtgtttcactgtaccatagcgtgactgttgttaacaataatataccgtatatttcaaaataggtagaaaagaggattttgaatgatctcgtcacaaagaattgataaatgttcaaggagatgaatatgctaattaccctaatttggtctctatacattgtatatctatatcaaaacatcatatctcataagcatgtacaattatatgtgaactaaaaggaaaatggaactaaataaagtaaaataaaatggtcctgcaacattttagccagaaagaaaggaaaacatattttaggcagaaggacagtggaaaagagaagacaatatttgatgtttaattttcacagttaatgcaaaacaaaagcgatagaacaaaagtttatgccattttcaccaatagaaccattttggaataggatcataaaaaatcaggttataaattactgctaataatagctgacaattgactacagccaaataatgagttcaaaagcattttatcatgttccattttcagattttttagatagtaattaaaacaatgaataatttagtagcaactttatgttaaaggcatagttaaatgcatagatagaactattcacaggagtttcacagacaatagaccatgtgtcagtcctttattataaatattttaaaaggaatgcatctcaaattttttccttcagccataaaatctttgtttcaagtgagatgtttgttaaagtacttggtataccgactgtcatttaaaaatctaaagacatttttttcagatagttttctcaaatagaaaagacaacctggccatttcttgccaattatgaattttaaaatacagtcttaattataatatgatataatgttcatactaagaattgtgctcatgcaaattgaacgtattaatcagaaaataatttatgttaacatattccttagttcatatagaaaagccacataatacctatatactaacaaagctattgatgtacatagatgaccagtcaaaattacttattaatagccttataatgtgacttgtcagatgtgcccatttgcctaagagtcacatagtgaattcagattcagtcattagttggtactctttctagcaaaatagcttctatggattcaagaaagaaatgattagaggatttgctgcacttaagaatttgagatctgagataatgaatcccctgagatagaagaagatgatgtccccatggtgcagttaactctactgtttgctcagtggaaggatattggaatcatagcaaggggagaaattccagaagcaaattttaaagcagtttctctgcaaaaacatttgaatcctctctattgcccactgagccctgcctcctcactatcctaatgcagacagcatatcacatatcacatatattaaaacaaccttaagttggacacttatcagtgtttcttataaatactattattttactttgaagagtttttctggggaaaggggattacagactctaagacttagaagtgtctgcagaaactactgttgtccacttcccaatattaattcttgttaaaatgtatattatatatcatactaagtatggtatgcataaaccctttatcttaatataacatcatgttaaattgttggatatctttaatgtctccaaaaaagaaatgctaaaatttcatttagatttatcctttataaataaaatttttgataacaattaattctctttttgcaagtaatgtcttttttttttttttttttttttgagatgggagtctcactctgttgcccaggctggagtgcagtggcacaatctccactcactttaacctgtgcctcccaggttgaaaccattcttgtgccttagcctctcaagtagctgggaccacaggcacatgccaacacacctggctaatttttataattttagtagagatggggtttcaccatgttggccaagctggtcttgaactcctgacctcaggtggtctgctcattttggcctccaaaaattctgggattataggcgtgggccactgctcccggccaactgatgtctatttcttcttgtagataattagtaacatcttccgcggaatttgacttcagtttttctagagtccttttaacttctgtttcaaaaactactttccttgatattaaagtcgttgaaataatctacaccttctgctcaatcctgcagacttaaaacatcatcaccactgtctttggctcatctctttcccagaggacacacatttaacaaaatttccaagttaacctcctatgttaatctctcacacttcccccatctttttcatttttacttctcttatcctactagagagcctcattatctattgcaaagattgttgcagtacatttaactaatttcctatgtttttgtactccaagtggttttttactttgctaaatgtagtcataaaataaaggtcttacattgtctcagggtttaaaatccttcaagttctcatctcctatagaaacacacattctttaatatcagccttggttctggttcctggttctcattcaacatagatcctcctttcagtctcccatattgccccatggaatttcagatggaaacattgaattcttcatgattttgaatgtataattttaaatttccatcatttttgcaagtagtttgttataaggtggaaaaagcatgaatttttggtaattgaaagctttcaaattctagttctgacgtacactatgcaagctcaagaattagtgaaccacattttcattatctatcaaatgtggctaatacataccttaaagggttattgaaagattaaataagaccatacatacaatatgtttaacacttttactagctcatggcagcttttcaatagttgtgagttctcctttttaacatgactttttgattatgattatgatatttcctcagccagtgatgtattactatatactcctattaaatattacaatttttatttgccttttgaaaatatttttaattcttctttgagtactttaattagtcttcttttttcattccaaaggcacattctttttttttttttttttgcttctgtgtctatattattattatttttattatactttaagttctagggtacacttgcacaaagtgcaggtttgttacataggtatacatgtgccatgttggtttgttgcacccattaactcatcatttacattaggtatttctcctagtgttatccctccccctgccccccaacccatgacaggcacccgtgtgtgatgttcctcgccctgtgtccaagtgttttcattgttcaattcccacctatgagtgagaacatgtggtgtttggttttctgtccttgtgatagtttgctcagaatgatggtttccagcttcatctatgtccctgcaaaggacatgaactcatcccaaaggcacattcttgaaggtgcatgttagcacttcttgccttgcagttattatgctatgcagatcttaggacatctctaatatggagaaagccactgttaaaccttcttgagttctaccttaaatatttttccaaatacatttttagtgactttaaatctagggttaaaatgctttgttttcttccatttgttatttaggaaaggcctacttgcttggggaaataagaactttagatcactttccttgaaaggcaatctcagaattgctcatgctttacacaaaaggtagagcacgctttctctttcaagtataatgcgtcccttctcttctacagaatttttcaaaagttgactgaagtatccttcatgctgtagcatactgagcagtatatattccctggaaatgcaaagtccaaataaaacctttctgtgggttttccagtccactgttctgagtattctttattctgagatttttgcatataattcttaggaaatcctgatttttcactgtgtctagatttcactcatgcctctgaaatgaatgttttttacaggacttgaaggtagtatatacattagccaaggacggaggataatttgagagagtcagatgaactgtaatgggtttttatagcaaagcttttgacaaaaatcgttctgtgttttgccttcaaaactagaaattactatatacttctgtatataagactaagttagacaaactataccttaactaataaaaatgatcaaagctattgtctaacaccacagaattaggtcatgtgtttgtgtgtgcatgtgtataaaatttgaaaacatttttctggcaatcaaccagaaatatgccaatttttaaagttacttaaatttttttccaaactagatatataaaagttcaatgatttgaggatctgtatcagcaccagatgatctgttatttttcagcaagtgtatctggtttgcagttgattcttgtttgaactaacatgaggttttccttccaattattggcttagatcttgatcataccagaagttatgccagaaaagtccaaatgaccttttgtttttcttacaagtatttacttcttcactacacaacaccgtgttgaactctcaacatattaattcaacaccaagtaaatataaaatctattcatttgctctcataaattgtaactaatttcgtgacaaagttttaagttttggggtgtgagtcctagaactaagttttagcacttccaacttttaatgatacaggttttgtacatcatttgcatttaacatttacatcagtaaaaagacatattgtttgttgaggtaatcaagttgctttttgttccagaaatgcaaattatttttttctcatactgattctgattctaacacagttagttccaaaaggcattcctggctgttccaaattgtgcacggaaatgcttccaggttgtgtttcattattaatatcacttccttgttatctcactgattcgaagactcattattatagtatgtaaaaggaaagtatcagaaactttttcatactttttgtcccactattccactcatttcaaaatttaataataaattatttaattaaaaatacaaaatcactgcatacttatttgttaaaaaagaattacactgaatttttaagaagcaatagtatctacataaattggggttgataagcttatgagactcatgattattccaaagtataatgtgcttcacattgaatgcccagtgtagccacactgcccatttagacttgggacaacatgcagagagtgatggaatgtttctcaggtgactctgacaggaggctcattgatgagtggttgctatactatttttacaattagcttgaactaataaattcattttactaatttttttactacttaacacagttactatctctgtatgtaccaaccagtatagaactattttaatatatttccataatataatgtgcctactagccaagtataatccttgctgaacatgtttacaaagagtctcggagacataacatattttgcaagaacatgtaaagcgatatttgattatgagacaagaatttgttagataaaaccatagcaacctactctaactgttcaataacttcattttatgtctacccactatcacttaaagctgaaaatgctcctcaccaagttgcgtaatgccccctttacattcttattccgcagggtgtagataaaagggttgagtgagggagtcaccactccatagaagagggccatgaacttgggttgatcccttgagatggaggaggggggctgaaggtacatgctgatggctgggccataaaataagaaaactacaataagatgggaggagcatgtcccaaaggcctttttccttcccttggaagatttgatcttaaatacagcacttccaatactagcataggaagcaagaattaagcatagtgggacagctaacataaaaatgcataccacagagagtgtgagctcgttagaacccttttcaccacaggcaatctttatcagaacaggaatctcacacaccaagtggtccagtttattgagaccacacagtggcaattgtaatgtggcagtggcctctgagacagcatagattattccaattagccacacggtggaaactaaggatacagacgcgctgattcatgatgagggtgtagtgaagaggtctgcagatggccacatagcgatcaaaggacataatagccaaaagcaaacattctgttccccccattatgtgaaagaaataaagctgaaccgcacaccccatatagctgatggtcttcttagagcttcccaggttaaacagcatctgagggacaatgcttgtggtataacacatgtccaaaaaggagaggttggtgaggaagaaatacatggggctatgaagacgagagtctaacctggacatgagaatgattgtgatgtttcccatcacggctatagggtacattataagaagactagtgaacagaggaagctctagccaagggcggtctgcaaagcctagcagaataaattcttcagggtggctttcattagttagtggcattatcttcaatttgtttcacctgtagtagggatatgccaaagaaggtagagctatgggtatcgacaaaacatggtgatgcattgattgtctacttatagatgacagggtgcagtaacctggggtcagaataacataaaacatctggtatcaggtgatcttattttcctatgggacactacaaattaaaggcagatatcttaatccagtaacccaaccattctgaaatggaatttcttcttctgtgtaagaaggttgacaataactaccattcttgagtgaggtgaggattaaatacaaagtaaaagtgaccgtatagttttcaaactttgagttgcataaaaatcagctgagaaggttgctagaatgaaatttattgtttcctatctttaggtgtctgatagagtaaatgtggcctggggctgaggaacaggatggttcattttcagaaacagtgctgcaaggcattactgaaatgctaagaagaataaacatattgaggtagcaatggtaggagaaaaaggaggagaaaacctggagtcataagaatcatcaagatagcattgtccagctccaactagttagttaaataatcatatcatctccaagggaggcaagaagacttttggatttaaatctatctcagcgatttgaaattgaacaagaaaattaaatacttttattgtctgttttctcaagtataaattgagagagttaacctacaatgacaaagtttccctatgctcaggaattcgattttgcattcttgggcttttattcattacgatttagttcaacctttgggcatttgatattttatgttaaattttagctaacatccattttgaaaaaaatttttttattcaatgagattatcatcttgctttaatataagagtttggatagttgtcatgacccactgattgcacataactacaaatatgtcttttagttctgagtgactgcagtcaggacaaaagttgatgtcccaatttaggcttagagacagtcaaatctgaaattattttacattttcaagacctttccttttttttcagctagaaagtacattgatataccaacctcaactagtttagtgaagcagtattttgagaaagattaattttttgctcatatgcttttcttttagtggtgacatgtgttttatgaatatcacaattttctgcaggatgagaaatattcggttgaaaagttaagatagcatctcagtgacaacattctgagtaactctgccagtcaattagttgtttaatggtaacagattacatttataagtttataaagcacagcttccacattctctgtttcattacatcttcaaagtcatcctgtgaggtgtcatacaaagctcctcagggctaacatgtgaatgttgccctttgattatatgctatctcacgccggaagtgtgcaaaacaataataacactctttccaactagtccttagtgaaccctctgtgtcaaacacccccatatgctttctacaccattaaatcatttagtatccatccccaaacgctatgacaaagaaaattttactatccatattttaagatattgttaatcatttgtttccatactctgctaatgactaagaacatcctaaagattgaaaagtaattgctgctttaaatgaggtaataaaatattgagactataaactcagagtttcaagagccccagaaagcatctgtactcgagggttgttcctgaatgagtgtgacccccttcacattatttgaccttgatttaatcaagatgttatatgagtgcatcaaatttagaaatatgtcttggcctgagtgctttttcagatgaaaatccgtattggaaatgaaagatgaaataaaggcatgatataaactaatttgatgtcaaaataaatacagtcatacatagcttaacaagaggaatatagtctgagaaatgtattgttaagtgattttgtcattgtgtgaatataatagagtgcacttacacaaacttagatggtatggcctagtacacacttatgctatgtgatatagcctattgctcctaggctacaaacttgtgcagcatgttaccttactgaatactgtggacaatcataattcaatggtaagtatttatgtattaagcgtatataaaaatagaaaaggtacaataaaatatggtataaaagataaaaaatggtatacctatattgggcacttaccataaatggatcttgcaggacttgaagttgctctgggtgagtcagtgagtgaatggtgagggaatgtgaaggcctagaccactactgtacactactatagactttgtaaacactgtctatagcctacactaaatttactaaaaaacacttttctctgtttaataataaattcattttagctaactgtaacatttttacttcataaacttcttaatttctttaactttttgattattgaataacacttaaacccatcatacagctgtacaaaagtatgttctttgtttatatccttattctataaattatttctatttttttaagttttttaacttttttgttaaaaatgaagacacaaacacacacattagcccaggcctacacagggtcaggatcatcaatatcattgtcttccagctccttgtcccactggaaggttttcaggggcaataacatgcatggagctgtcatctcctatgattataataacaatatcttcttctggtatacttgctgaaagacttgtgtgagactgttttacagttaactttttaaaaataagtaggagtataaaaaatcataaaaagtatagtatagcaaaaatataaaccagtaacatatttatttatcatcatcaagtattatgtactgcacacaattttatgtgttattcttttatatgactggcagtgcaggtttgattataccgtcatcactgcaaacacttgagtaatgtgttacattataacattatcatggatacagtgtcactaggcaacaggaattttttagctccattgtaatcttatgggaccactgttgaacacatgcatggtcagtcattgatgaaaatgtcattatgtggtgcatgcctgtattctgagaattgcaaattacattattaaataatttcactattagatacctgctatctttatttaacattgttatgttcaccttttatattttttctaccagggaccatccttgaattttttaaaaagcaattttagatttgatcctccatgaattcttccataattataactaattataactacctttaatgacaatattcactccagtatgtcttccgcaattttattaaatttatattatttgggattttgttattaactttattaagtatattttgtctgtgagtggtggtcacccagagctcctccatttctctggacatttccctgaagacatcagactaggaatgactaatcaatgtgatttaattttgaagtatatttaagctctgtaattctattcttagatctcatatttttttctcatgtcattcttgtattttatttcttttagctttgggattttatctgtcttttggatcttatacttcaagaaatgtttcatcactattttactacatggggatttacttaatcacaaatgtttaaagccactttattaaagtgccagacccatgagttgagtaaattcctctcctcatggggtcccaagataaagcaggaatccttggaatgttagaaaatgacattctttacttaccacaggccagaaaccctgtatagggactgtgtaggcaaggtagaaggtcagttccccaaggggtttttattggctctataagtcaagtttcattccttaaaggaaaacacaccattccagtcaaagccttggtaaaataaccaatttctccaactgtgtccggctacaaaaaaaaaaaacagattcttattgcacttatgcaaataaatatattgccatcagttaagaatactcacaaatagtctccaaattctggagaaatcaggtagagagaaacaaatatggtccatttttttttttccacagaagtatactttactcaattgctaaaggctgtaaatagctcaaagtaaaagttttcttaactctggaaaacaaaacaaagggttagcaacgttttaagcaaagtcaaaaagattagtttattcttttagtttagtttatgcagttaactcctgttctgtttgatattcatgaacattcctgttcttcacgagagttgcaaaagttgtttcctctattctaatgtcacaatttccaaagttatcagaaacctgcatttaagaacatccgttagagttgtatagctgactataaaccaccttttgaagaggattaaaacaagacaattgtctgtgtatgacaaaactcgttaccacagccactggcaaaaacgtgattgacaaagaaattttggtaatgtataaaataattattcttgttccactttatacaaataatcaggccaagtgcaataaagtaaatcagtcttatcataatttgtcttcagtaaaaatgagaaactgaagtgagaaaaattatgtttcaagaagtatggtacacttgttattaaattctagtctcatgagttgtttttaagtttgtttctacaatttaggctaaacctgcttattcctgtgaaccaaccagtgatcttagactgttactcagaagatacaagaggtttgggtaatgtaaaaatctggaccaatattctaatcatgggcacatattggaatcatctggcaaccctgtatcagcttggttttaacagttgctcagttcatgggaagcctttaaatttagtttacctggaataattttacttattttgctttgctgctgtggaatacattgcatttgtactctttgcatacggatgcagaatatgcttagtgaatgttttcttaaatggaacacttatcaatctttcagatagcacctcttgttgaaactcagagttatgaatggctctcatcataccaatgctttttgacgagctcctctctaccccaaatacgagagactctaattgttaggcaggaatatcattgctcctcttaagcctgaagaagctacagaaggagatggatctttgtccctctccaacccttaggattaagggttctcttgtaaaggggagggaggaaatgtcagaggcatgtgagccagagcagctccatcttgaatagcagctgggtaaaatgaggttgaaacctactgggctgcattcccagatggttaaggcattctaagtcacaggatgagacagaaagtcagtacaagatacaggtcataaagaccttgctgataaaacagattactctaaagaagatggccaaaacccaccaaaaacaagatggcgatgagagtaaccactggtcatcctcgctgctacactcccatcagtgccatgacaacgtcaggaagttgccctatatggtagagtacatttgtttacaaatgccatggtaacatcaggaagctaccctgtatgttctagaaaggggaggcatgaataatccaccccttgtttaacatatcatcaagaaataaccataaaaatgggcaaccagcagcccttggggctgctctgtctatggagtagccagccattcttttactcctttactttctgaataaacttgctttcacttaaaaaagataaataaagtaccagaccctattcctgttgatgtctcctgttttatctccacttccatcttcattctagtgtagcttatacttcatttttaccatacacaatattttctttatatgtactgcacttgtagactttctatatagtaaaagatcataagaagaaataaaagttatttttatctgacattaggaatctgcatgaaacacacagacaaatcaatccatccaattttgaacatatattctaaaaatccacctgattgaaagaaggcttcatatttgttttgggcatttaatatttctcagatatagtgtataaatctccctctcagtctctcactgaaaccaaatttaaaatcataatgattttaaatgggtttaatgtttttaaatttggtttcagtgagagattgagagatagattaattacaaagagaaatctagttgcttcttagaaccactgagcagctgtttccaaaggttagaaaaggctccctgaaatgaaatgctctctgcctttcagatgtatattaggcagtggcagtatgatctacacatatttcaatttccctaagaatgcatggacttgaaaacgtgcctttttactcaccttttgataaatatctttcaataaaaaggaattatgaaggaatacacttgaatttttcaaacgttcagaggatggataaactgtagtatacatgagtatttaagaattagcttcacaacttaggttttcaattgttacagggttccaaagagaagaaaacatgggttaggaagacaatagtagaaaatatcagaatgctttgtggatgtgttatttgtaagctcttcctgagacctcttgggcattgttttccaacaggccattaatccttatcccagatgaggagttagcagagaaaattccttgggacagagatctctatggaaatgctacttatgtacaattagtttcctactgaactgaggttggtaggaagtctcttctgttgtcagatgtgttttaaaatacatttactcaatttcccaaaacagtagacactaattttaaatgagatgcaattagagatgagctagtttgaataaatgattctggggaacttaaatgagaattccctgaataccttacctcattaacttctagactacctcacataaaatttaatcatttctagttgtaagaataaaggggcacaaaaatgagttgaaaaggaagaaagataataaaaagatatttccaatgagaaggaatcaagtgatagtttaaaacatttcataatatttaatgctttcatattaaaatgatgaaatgataatttcttcactctcaccaagcacataccacataacattaggcagatacacagataactttgagattttaaaaattacatacaaaatgcataaatacattatgttgaaaaacaaattcaagtgcatgggatagcaaatacaaatttaaagggttttttttttaagatggagtcttgctgtgttgcccagtctggagtgcagtggtatgatctcagctcactgcaacctctgctgtacagttcaagcgattctcctgccgcagcctcccaagtggctgggattacaggcattccctttgatgacctactgtcatggtctgttgtccctctcctttctttaaaggtaaccgttagtgtcataagggtgtgcatctttccacattacatatgtgctggatattttccactcccccttccttcccctgccccagattcactctctatccaaccatgtttgtttctaccctgtgttgtgcctctagaggcgaaatcaagagaattccatgatatttgacttctggttgtgttcagccaatgagtcaccagctgaggattagagtgaggcagcagctagtttgaagtattttcccctaccctctccttcagatgggacaaatgaggctacttgtattgctcaaccaaagatcacaggtcatggatgtagccacgtacaggttctctctctttctgctttgtaatagtactttctccctttgctacttcaggccttgtgttggttgctaagcctcccaactgttgctagattcagagtagtccatatataatacatatacagaaatcccttgttgatgttcctaaatccttctcacaactttgtatttacttcttttgttaaacctctttcagttcccataggagcatgccatctattttctgctgggaccataggtgactgtaactttccattacaaacaaaggtcatttcctgctttaggacttttgaattagatgtttttaggtctaaaatgctctttctttgattttatcatgactagctcctttctgtgtttcaggttgatctcaaatgtcacctaagaaggaatatctaatatgaatatactacacagtatctctatatcatattctcttttaattttctgcaaaagaatgaaagctttcttagttattttgcttttgaagtctccccctctagtatgcatagtttttgacaatagcaacttaaataatacaattaaatcatcttgaacatattgttacttgatttttacatacatatgtacacgcacacacacgcacacacactttttgtcatttcagagacaatgactgataaaggaatttttttcttttaaacacatctctagcttatctacttttgctgaattccataaactttggtatgttgtgtttctattttcattctttgcaaattatttgctattttcccttgtgatttcctctgagccattcattatttaggaatgtgttgtttcatcgccacttacttgtgtatttcacaatattttgcctgatattgatttctaattttattccattgtggttagaggacatcctttacattattttaatcttttaaatgtattgtgatttgctttatgaccttatagactaatctgtagaatgtttcatgtgccctgagtaatatatgtattctactactattgggtggagttttctgtagaggtcaattagctgtagttagtttataatgctgttcacatcttctatttccttgtggacctttatctaattgttctattgttattgaaagtgggatgctgacattgaactataattatggaattatctattgctccaaacagttctgttagtctttgttttatgtagtttggagatctgctgcaaggtgcatatgtacttataattgatgtatcttcttgatggaccagcgattttatcatcataaattgtccttctttgtttccagtaataattcttgtctttttgttgatattgtgtaatatcagtatagccatccattagcactctatcttgcttactctttgaatggaatacttttttcatcttttcagtttcaacctatttgcatttttgaatctaaagtgaatatattgttgacagtatatcattggattgtctttttaaataaaccttgtgaatctcttccattttttaaatgaatagactatttttcagaagctttaggtttacaaaaaattgaatggaaggtgtagagaactcacatgtaaccccttttactccctcccccagagtttcttttattattaacaacttgcattcatgtggtacatttgttataattgataagccaatattaatacgttattagtaaccaaattccatagtttacattagggttgatggtgtgtgttttacattctatgggttttgacaaatgtttaataacatgtattcccccattcagtatcataaagaatggtttcactgccttaaaaattccctgttctccttccattcatcatttcctcccctcctccccgggagcccctgacaaccactgattttttattgtttccataactgtgctttttccagaatatcatacaattgaaatcatatataatatagacttttctgactggcttctttgacttagtaatatgcatttaaatttcttccaggtctgggctttacaactcattttttataattgaataatattccattctatgaatgtaccacagtctgcttattcattcatttattaaaggacttttttttttttttgcttccaagctttggaaattaggaataaagctactgcaaacatttgtgtacaggttctgtgtggacataacgtttcagattatttgggttaataccaggacacgtgagtgctggattctatggttaagatgtttagtgttgtatgaaactgtccagttgtcctctagagtggttgtacacttttggatttctgtaatcagtgaatgagagttcctgttatttatctctttgtcaacatctgatgttttcagtggtttgctatggttgataatgtctcagatttctttaggctgttttatttttcttcattcttttttctttttattactctgactagataatctcaattgacctatcttgtagtttgttgattcttccttctgcttgttaaaatctggtgttcaggtcttctgctgcattttttatttccatcactgtactttttcatctctagaatttgacttggttctttaacaacaaataatgtctatctctttaataattttctctatttagtgagaaatagttgtcatatcttcctttagttctttaaacatggtttatttcagctctttgaccctatttttaaagtagctgatgtaagcctttgtccaacaagttcaacacctagatttgctgctattgattgcatttccccctccttttatgacccatacttcctgtgtctttcttcacttgtattataattttatgttgaaaactagatacttcatttcatttatttttatttttaaaacttttatcttaagttcaaaggtacatacgcaggtcatgggggtttgttgtagagattatttcatcacccaggtattaagcatagcatccattagttatttttcctgatcctctctgtcctcccatcctccaccctccaccaggccacagtatgtattgtttccctctatgtgtccatatgttttcatcatttagctcccagttacaagtgagaacatgtggtattcaattttctgttactgtgttagtttgctaaggataatggcctccaactccatctatgttcctgaaagggacatgatctcattcttttttatggctgcatagtattccacggtgtgtatgtaccacattttctttatcgagtctatcattgatgggcatttaggttgattccatgtctttgctattgtgagtagtgctccaataaacatatgtatgcatgtgttttcacaattgaacaacttatattcctttgggtgcttacccagtaatgagattggtgggtcaaatggtattactgtctttagaactttgaggaattgccacaatgccttccacaatggttgaactaatttacactcccaccaacagtgtatacatgtttgtttttctccataaccttcccagcatctgttcttctctgactttttaataatagccattctgactggtgtgataaggtatctccttgtggttttgatttgcatttctctaatgatcagtgatgttgagcttttttcatatgattgttggctgcatgtatgtcttcttttgaaaactgtcggctcatgttctttgctcactttttaatggggttgtttttctttcttataaatttggaaaactaaatattttaaatactagaaatggcaactgtggaaaccagattctccctgtctcactagaatttgttgttgctgcttattaatgtagttgttgctgcttattaatgtagttgttgcttgcttgtttagtgaatactcccaaataattctctaaagtctgccttctttgtggtgtagggccattaaaatctgtactcaggtagtctagtggccagcaaataattggacagaaatttctttcaatgcctgggactaataaatcttccagtttctgtcaaagacctctatgttcatattgaggcatgactctgacacctagtcaggcagttcacatctctaccttagcctccacttacttcttcctgaaatactgaaggtcagccagagacaagagtttagaatcttctcagttcttgcttgagcatttatagagtcctgaatctgaacacagccatatgcatatacatgaaattcctggcatatggcaaagattttcaaaatccctatagacatcccattccttacattttttaagctcttttattgctttatggtctgccccaacttttatcaattgctttagtcagaagtgaagttaaagcagtcacttgaaattattttcaacaaatacctgctgagaaaatgctttttgcattggtcgaggtctgagtcatggtcaaatacagacagactcatgaatgaagtcttccaaaaagccccagccaggtaaattaaagacatatctttataagtttatacatatatctttataaaaggtatataaaatatttcacttttcattcttttttggtattttggtatttcaggagatttgattttttttgttttgatgcttatatttacacattagtccctcttttaggcatcattgattggttttctaaaatgagcactatatttatttatttatttaatttttcaatatattatagttgtacatattttggggtagatgtgttttcttacacatatacaatgtgtaatgattaaatcagagtgattataatatctatcaccacaaacactttgtgttgtgaaaattacaatttttttctagctattttgaaatatacaatatatgttatgctaatattaataaatgttagttgtattttctctactgtattatcaaatactaaaaattattccttgtatctaactctatttttgtacccactaacaaactctttttcatctgtttttccttgcatccatttgcagactctgataagcaccattctacccttgaccttcataagatccactttttttagctcctgcataccagtgagaacatgatatatttgtatttctgttcatggtttatttcacttaacataatgacttccaattttatccatgttgctactaatgaaaggatttcattattttttatggttgaatgatattccatcatgtatatatattacattttctttatccatccttctcttgctagacactggtgttgcattctttgtgtgtttctataggtgaagtgaggttcttttttttctttccaatttttttttttgcttttttttatttttaattttttttattatactttaagttttagggtacatgtgcacaacgtatttcaggttcaagtggtacatgtgcaggtttgttacatcagtaaattttttgttatgggggtttggtgtacagataattttgtcacccagggaattagcattatacccattaagtagcttttctttttttttaaactttaattttaggttcagggtacctgtgcaggtttgttatataggtaaattgtgtgtcacatgggtttggtgtacagattattttgtcacccatgtaataagtgtggtaaccaatgggttggttttgatcctcacctcccccatcataggccccagtttctattgttcttttctttgtgtccttatgtactcaatatttaactcccaattataagtgagaacatgccatactggggtttccattccttcaccaatttgcttaggatgatagcttccagctccatccctattactgcaaagaccaaagtctcgttttttatagctgcatagtattctgtggtatatatgttttctgtatccagtccaccactgatggacaactaggttgattctgtgactttgatattgtaaatagtgctgcactgaaaatctgcatgcatattgctttatggcagaatgatttatattactttggttatacacctagtaatgggattgctggatcaagtggtagttctattttaagttatttgagaaatctccagacttctttctacagtggctgaactagttttcatttccaccagtggtatataaatgttcccttttctccaccacctcaccagcaaatgttatttcctaactttttaatagtagccattttgaccggtgtgggacaatatctcattgtggttttgatttgcatttctctggtgattagtgatattgaactttttaatatacttgttagatgtgtatatcttcttttgagaagtgtctgttcatgccatttgctcgttttaaaaatagagttgtttgtttttcacttttttatttgtttaagttccttatagattctggatattagacctttgccagatgcatagtttgcaaatattttctcccattctgtaagttgtgtgtgtattccgttgatagtttcttttgctatgcagaagctctttagtttaattatattctatttgtcaatttttggttttgttgtgattgcttttggagtcctcgtcttgaagtcttcgtgaaagtcgatgtccagaatggtatttcctagaatttcttctattgtttttatacatttgggttgtacatttaagtctttaatctatcttgagtttatttttgtgtatggtaaaaggaacaggttcaattccagtcttctacatatggctagcctgctatgccagcactatttattgaagagtttctggcaggcagcaggcagcatataatttggtcttgtttttaattcatttaaccattgtatgtcttttaaatagaatgtagtctgtttacattcaattttatttttgatagttcatgccttagtactgccattttgttacttgttttctaatttcgtaattcctctcttccttccttccttcctttccttccttccttcctgccttcctctctttctctctttccccctctccctccccttccccttccccttccttccttccttccttctttccttttttccttgttattttcctctggtagtatgttttaatttgttgctttttattgttagtgtatccattataagtttttgcactgtggtgtccatgaggcttacgaaaagtatcctataatataacatgtagtataaaactgatagcaacttaactttgctctcataaataaaaacaaacttccaactaaaaacttatacacattaactccattcttcacccatattttgaattttgatgttgcaatttacattttttatattgcctatctcttaaaaattgttgtagttattattttaaattgtttttagttttcttactaaataggtaagtggtttaaatataatgacttcatttttagtatgacaatcacattaacattctttcagtttggtgaacttcctttagcagttctcataggacaggtttggtagtgatagaatgagcattattgaaatagttaataacctcttctttcctccatttctccagcatctatttcaaaatgacaattgatacaatatgtactttttatttatacaatatatacatacatactttttacacaatttatttatacaatatatacatatttatactctatatatatacaatttatacaatatatactttttaaaagtttggaatgttgttatcctcctctagatagaatttatttttgcttttgggaagtaattaaagtaggaaaacatccctaattttgaatggggtggatagaattgggacatacattgctggtaggagcgtaaaatgacacagacactttggaacactgttttgtggtttctttaaaagttacacataccttatggcccattcattcaactcttaaatatctgttcaagagaagtaaaaacatttgctcaaatgaagacctgtgctgaatatttatagccacttttttcaaaatactgtggcgaaaacctagaattactgtaagtatctgtcaacggatgtaatgaataaattatactatatccttattattgaacattactagtaatgaaaacaaaacaatgtgctggcctgcaaccattttagatgaatttcaaaatatttttgctgaatgcagaaagcaagactcaaaataatacacactatgtagatctatcactaagaattcaagaacatgcaaacttatctatgagggcataaattagagtagtagttgactaagtctgaaatcaaaagacaaaatagattttggagagtgatggaaatgttctctaccttgattgaggtattggtatcatgggtatatacaactataaaaatactgacttgcatactttaaattatgtagtttattttgcatatgctatcatcagcaaaggtgattatatactctagattgcagtcatttttagggctggcctatattcagtctatggttattcataggttgcagccattcacccattctagctgaaagtcttgggtatttatatgggccaaaatttccattatttgtctccccagaaatgtaaaatcatataagccctgtttcttagcctcttagtcaccagattctgttctgatgtatagctggtgcaaaaaacaaatatctttttaaaaatatttttattatactttaagttctaaggtacatgtgcacaatgtgcaggtttgttacataggtatacatgtgccatgttggtttgctgcacccatcaacctgtcatttacattaggtatttctcctaatgctatccctcccacagctccccaccctctaacaggccccagtgtgtgatgttccccatcctgtgtccaagtgttcttattgttcaattcccacctatgagtgagaacatgtggtctttggttttctatcctcatgatagtttgctgggaatgatggtttccagcttcattcatgtccctgcaaaggacatcaactcacccttttttgtggctgcatagtattccatggtgtatatgtgccacattttcttaatctagcctatcattgatggacattccaagtcttttctatcatgaatagtgctacaatacacatatgtgtccatgtgtctttataatagcatgatttataatcctttgggtatatacccagtaatgggatcactgggtcaaatggtatttctagttctagatctttgaggaatcaccacactgtcttccacaatggttgaactaatttacgttcccatcaacagtgtaaaagtgttcctatttcttcacatcctctccagcatctgtcctttcctgacttttcaatgattgccattctaactggtatgagatggtatctcattgtggttttgatttgcatttctctgatgaccagtgatgatgagcattttttatgtgtctgttggctgcataaatgtcttctttcaagaagtgtttgttcatatcctttgcccacattttgatagggttgtttatttttttcttgtatatttgtttaagttctttgtagattctggatattagccctttgttaattgggtagattgcaaaaattttgtcccattctgtacattgcttgttcactctgatggtagtttcttttgctgtgcagaagctctttagtttaattagatcccatgcatctattttggcttttgttgccattgcttttggtgttttagtcacgaagtctttgcccatgcctgtgtcctgaatggtattgcctaggttttcttctagggtttttatggttttaggtctaacatttaagtctttaatccatcttgaattaatttttgtatagggtgtaaggaatggatccagttgcagctttctacatggtggctagccagttttcccagaaaatattataaacaactctatggaaataaactagaaaatctagaagaaattgataaattcctggacacatacaccctcccaaaactaaaccagggagaagttgaatctctgaatagaccactaacaggttatgaaattgaggcaatgattaatagcctaccaaccaaaaaaagtccagaacgagatggattcacagccgaattctaccagaggtacaaggaggagctggtaccattccttctgaaactattccaatcaatagaaaaagagagaatcctccctaactcattttatgatgccagcatcatcctgataccaaagcctgtcagagacacaacaaaaaaaaagagaatttgtatttctgtgggatcagtagtgatatctcctttattattttttaatagatctatttgatttttctcttttcttcattattagtcttgctagcagtccatcaattttgtggatcttttcaaaatccacctcctggattaactgattcagattttctattttttcatgattcattgttgttatgtttctagaaatctaaccatttcttctaggtcatcctatttgttggtgtaaaattgttcgcagtattcttttatgatcttttgtacttctgtagtttcaattttaatgtctcctctttcatttcttattttgttagagtcttcttttttttcttagttggtctgctaaagttttgtcaattgtttttatcttttcaaaaactgaactgttagttttgcaaatgtgttcttttgttttctagtctcttacttatttctgctctgatctttgttatttccttccttctgctaactttgggattagtttgctcttctctttttctagcttcttgaaatgtaacattaggttgtttgtttgggatctttcttcttttttaatatcggcatttattactataaactttcctcctgctaagaacttcttttgttacatcccataagttgtggtacgttgcattttcattttcatctgtcttaagatattttttaatttcccttttgatttcttcattaaccctttgtttattcaagagcgtgttggttaatttccacgtatgtaatattttcaaattttatcgtattatttatttctattcatttctactttcatacttttgtggtcagaaaagatacttgatatgatttcagtcttcttaaaactgttgagtcttattttgttaccttatttggataatgtcccatttgcacttgagaagaatgaatattctgttgctgttggatggaatgttctatatatgtctgttaggtccacttggtctaaagtgtatgtcaagtccagtgtttccttattgatttttgtctagatgatatatccactgttgaaagtaaagtattgaaatcctctgctattattgtattgcagtctatctcttttcaggtctactaatgctttctttatatgtataggtgatcttatattaggtgcatatatatttacaattgttaagtccttttcatgaattgacccttttatcattacataatgaccttctttgtctcttttaacagttttggacttaaagttcatctcataaaagtacagctacccttgtcttttgctttccacttgcatgaaataattttttcaatcaatgtgtgttcttcaagttaaagtgaacctcttacaggcagcctacgtctgcatatagtttttcattttctttccaatgcaaagcattttagtaggttgtcaaatatacaattattagaaatatctaaatattacctgtaaaaactagtatatcacattagataattctataaaataaggaaacacaaatcacacattgccacaacctctgcagtccaataatatcccccgttgatagtacaaattacaaatacatttttaaaataaagacatgatttcgacatttaaaccaaagtaactatggctaacctaaatacattcattcatcaagtacaataaattaagcattgctacttatagtcactaataacaaaattttaggttcaattttacctaaaatttcataaatcttccaatacagttcccatagtaaagtgtctttgtgtgtgccattttaatttatatgcgggtgcatcatatatcagacttaagactatttcacttcataattaaattgttcatacatatatattgaaagtgaacacccggccaaaatttaatcccaatgatgacaaaatgtaaaattgttttaaattcttgaatgcatatactgatttgtttaattgcctgcatactactttttttaattagagactatcaaagtaagtaataagaatttaaatattaactcaaaaaaagatgaagccttcaaccttcctacaatagtaacaagcattttaaataacaatacaaggagtctgtaagctaaaaagtaacttcatattcattgcaaaacttaaaataccagtgaattgaagataagattgaggtctaaaatatttgtactgtattgtaaaatacaatttaaaatgtgcagttaatttgcttgtggacatgtaatggaatgtttttcaacagtaatgttatgttaaacacactttaaatggtcactctaagcaaacataaccttactagcaagaaaagcgaaaaattaaggctttcatgctatctatatctactacacaaagtcaaaagtcaaatagagcttacaatgtggcaaaatatttctaacttctgtgacattagttgcttcacctcaactcaatacttatcatcttatctttatacaaactcaaatgctagttatctttactatccataaatacaaattaaactaaggagcttccgcacagcaaaagaaactataaatagaataaacagacaacttacggaaggtgagaaaagattcacaaactatgcacacaacaaaggtctaatatccagaatctataaggaacttaaatcaacaaacataaccccattaaaaaattaacaaatgacaaaggatgaacagacacttctcaaaagaagacataaaggtgaccaataaacatatggaaaaaattgttcatcattactaatcatcagagaaacggaaatcaaaaccacaatgagattccatctcacaccagtcagaatggctgctatttaaaagtcaaaaaacaacagatattgcggaggctgcagagaaacgcgaacgcttatacactgttggtgagaatgaacattagttcagccactgtggaaagcagtttggagaattttccaaaagaactaaaaacagagctaccattggacccagcaattccattaccgcgtatttagtcaaaggaaaatatatcattataccaaaaggacacacgcactcatgttcatggcagcactattcacaatagcagagacatagaaccaacctaggtgcccatcagtggtggattggatagagacaatgtggagttccggcagagacccgggtgagacgcgctgaccatgggcctgcggaggggctgggggttcaggacctcccgcagcctctgccctgcaggctccaggtgccctcgctgtggctcccctcgcgggcccaggcctgaagaagccgcgaacctctcttccctaccccacctcggtgacagatggcagctcctctctcagcccagaccccgccagcctccatgtctcccggcccagccctgcggggcctaaactaagcccctgccgagctgctaggatgcagcgcatttgagtggctgcgggcgtggggggccgggaagcatggcgaccgccccaactcgcagcggaggccgttagggtgtggagggcgcgggaaggtgggtcgcctgccactggggcgcgggcagatcggaccgctctgtcccaactggtcgagaccgacctagtcctgacgacaggaacaacggcattaacaacggccggaaggtgagcggtgtcccagacaacgacggatagcggccacctggccactggtcttccttctctaccagacctgtatgtgggaagagagaagtggtggaacaacaggccacatttggcgcattggagatgaaattcttggttgaaaattcttttctttaagaatgttgaatattggcccccactctcttctggcttgtagggtttctgcagagagatatgctgttagtctgatgggcttccctttataggtaacctgacccttctctctggctgcccttaactttttttccttcatttcaagcttggagaatctgacaattacgtttcttggggttgcttttctcgagcagtatcttagtggtgttctcgtatttcctgaatttgaatgttggcctgtattgctaccttgtggaagttctcctggataatatcctgaagctgttttccagcttggttccattcttctcgtcactttcaggtaaaccaatcaaacataagtttggtcttttcacatagtcccatatttcctggaggctttgtttgttccttttcattcttttttctctaatcttgtcttcacaccttatttcagtaagttggtcttcagtctctaatatccgttcttctgcttgatcgatttggctattgatccttgtgtatatcttacaaagttctcgtgctgtgtttttcagctcctcaggtcatttatgttctcctctaaactggctagtctagttagcagtttctgtaaccttttatcaaggttcttagcttccttgcattgggttagaacatgctcctttagctcacaggagtttgttattacacaccttgtgaagcctacttctgtcattcatcaatctccttctccagttttgtgcccttgctggagaggagttgagatcattttgagtagaagaggcattctggtttttggaattttcagcgtttttatgctagtttttcctcatctttgtggatttatctacctttgatctttgaggctgatgactttggatggggtttttgtgtgacggtcctttatgttgatgttgacgttgtttctgtttgttagttttccttataacagtcaggcccctcttctgcgggtctgctgcagtttgctggaagtgtactccagaccctgtttgcctgggtatcaccagcagaggctgtagaacagcaaagattgcttcctgctccttcctctggaagcttcgtcccagaagggcactggcctgatgacagctggagctctcctgtgtgaggttctgtcaagccctgttgggagttgtctcccagtcaggaggcatgggggttagggacccacttgaggagggagtgtgtcccttaagagaactggtgtgctgtgctgggagaatccctcttgtcaggatcagctgctgtcttcagagcaggcaggcaggaacgattaaatctgcttgtgctgtgcccacagccacctcttccccaggtgctctgtcccagggagatgggggttttgtctgtaagcctctgactggggctgttacctttctttcagagatgccctgcccagtgagggggaatctagagaagcagtctggccacagctgctttgctgcactgtgatgaatttgccagtccatacctccgagactccttggaactgtcagggaaaatggcctactaaagcctcagtaatggcagacgtccctcatcccatgaagctcaattgtcctaggttgacttcagactgctgtgctggcagtgagaatttcaagccagtggttcttagcttgctaggttctgtgggagtgggacctgctgagcgagaccacttggctccctggcttcagcctcctttccaggggagtaaatggttctgtctcgctggggttccaggcatcactagggtaggaaaaatactccttcatctagctctgtgtctgcccaaatggccacccagttttgtgcttgaaacctaaggccctggtggtgtaggcacacaagggaatctcctgatctacagattgcaaaaaccatggaaaaagtgtagtaacaagctaggcagcactgtccctcatggctcccctggctcggggaaagaggtcccctggcctcttgaacttcctgggtaagcaactccccacccttcttctgcttgccctccatgggtttgacctgctgcctaaccagtcctaatgagaggaacggggtacctcagttggaaatgcagaaatcacctgccatctggattggtcttgctgggagctgcaaaccagaactgctcctatttggccgtcttcggcttcatccttttgtgtttttaagaacagtcttccctatgaattttaccaaaaagtgtactcagtacagtagtttactaactctacttttgtcatacactagaaacatcttaatatctacaaagactagatgttgaaaattaggactaatttgtccacttatatgcactatatacacagcacagtaaaagaaaatgcagacataagggacaatggtaaagtgtgcctcaccataaacacactggtatttcaattaccctttgccctttctgctcctctttcctccctgagccaacacacatatagtaatgtgtactgctcagataagtggtttgatccatttcccaaagacaatatttcatatgaatcaaaaggatatctacaaagtgttatttactccctctacttttaacatactttgtgcacttctagaaagactagatgtttcaaataaggacttaaatttgtccactatatacacaggtaacaatggttatatctgaaagtgtcttctaaataggaacattctggtctaaaatctttcattccttctaactcctctctaccaccaacctagtggatataggcatatgtgtcatttagaactgatgttatcatttcacttccaaaagtccttttcagaagatagcctttctatgaatttcaacaaagtgtacaaaaatagagttagtaaactaactctcataaattgttataaattggcaacctctttaatatctagagactagactagatattataaaattaagactacttcatccagtatacacacaatatatacagtatagcaaagttaaatgcaatgcatgtaacatataggtaatggattaagctgaaattttctagtaaacattagcaaaacactttttattttttattttttattattatactttaagttttagggtacatgtgcacattgtgcaggttagttacatatgtatacatgtgccacgctggtgcgctgcacccactaactcgcatctagcattaggtatatctcccaacgctatccctcccccctccccccaccccacaacagtccccagagtgtgatattccccttcctgtgtccatgtgatctcgttgttcagttcccacctatgagtgagaatatgcggtgtttggcttggatgaaattggaaatcatcattctcagtaaactatcgcaagagcaagacactttttgcaatatcttccttccaatctccctcaacccaatgaacatgtacagagaggacgctgttcacagaggtggttcaacaatgccagttccaaaaagtatttctcattacttttaaaagatatttacagaaagtgttattctactacttctatttttaaatacaccaagcacttccaaatatctagaaagattaaatatttcatataacttgtccaccatgtacatggcactgttaaataaaattgcacacacataacaacagttataatctgaggtatcttctaaacatgaccattttggccttgaagtagtccttcctttcttctctctgcctttatttcagtagacaagtataggcatgtgtcatactttagaaatggttgaacaaatttagatccaaaagttatttacagaagacaaggtttcctatgaatttcaacacaaagcttacaaaaagtgctaattttactaagtactttgtcatacactgccagcctctttaacatctagagactagatgttgcaaaattaggactcatttgttcattatatgcgctatatacagagcaaaacacaatgcacaaaacatacagaaaaatggtgcctgaaaatgtgcaagtatgagcacactagcatgttaccttttgcagtttcatccgtcccagctcctctaaactactgagcaagtatagacagtactataccactcacaaagatggcttaataattcaatttccaaaacacagtatttcctatgaatttcagcaaaaagacatttacaaagtgaaattttgctacctctacatttaacatacatcaggcccttctaaacatctaaatagactagcggtttcaggtaagaagttaatctgtccactatgtacactgcagccttgaataaactgcatacatgtaacaatagttataatttgaaggagtcttccaaatgtgaacattctggcctaaaaatctttccatctccatcaacccagtgggcaagaatgctcaagttttcagaagacaatcttccctaggaatttaaaaacaaaatgtacaaaaatattagtttgctaactctacttttgtaattcactggcaacctccataacatctagaaagactagatgtaaattaggacttgttttcctctatatacactttatacatagataagtaaaagaaaatgcacaaacataagatataatggttaatcttgcctcactgtaagcacactggtggcacagagctctctgcacagcctcctcctcctcctctcctgaactggcgcataatacaatgcatattactcaacttgtggtttggcccttccccctaaaacaatgtttcattcgaattttaacaaaaagatacttacaagatgtgttattttactacttctagtttaaacatatatcaggcacctcagaacatctagaaacactagacatttcaaaaaagtgtagcattgtcaatgatctatacagtagtagggaataaaacgcacacaaaacaatggaaagaatatgagaatgtcttctgaatatgactagtctggcacagaaccttcttcttttccttctcaggtcttcttcttcatgccctctaacccactgaacaaatgtggttgtgtctgtcgttcctggtatggcttccagaagtggtccaacaattccattgcgaaaagccatttccagaagacatctattttctatcatttctttttgaacaaatgagaatttataagatgtgtgattttctaactttatcatacatcacaacctctttccatctagaagggctaaatgtggcaaatgttttctatttaaaagttggggcgggggcagttgagaaccgctttctcactttacacacgcagggccttctataaacggtggtaattaaatcttcccaaagggtagtgggcatctccaatacgccaaatgtggcctgttccaccacttctctcttcccacatccaggtctggtagagaaggaagaccagtggccaggtggccgctatccgtcgttgtctgggacactgctcaccttccggccgttgttaatgccgttgttcctgtcgtcaggactaggtcggtctcgaccagctgggacagagcggtccgatctgcccgcgccccggtggcaggcgacccaccttcccgcgccctccacaccctaacggcctccgctgcgagttggggcggtcgccatgcttcccggccccccacgcccgcagccactcaaatgcgctgcatcctagcagctcggcaggggcttagtttaggccccgcagggctgggccgggagacatggaggccggcggggtctgggctgagagaggagctgccatcagtcacggaggtggggtagggaagagaggttcgcggcttcttcaggcctgggcccgcgaggggagccacagcgagggcacctggagcctgcagggcagaggctgcgggaggtcctgaacccccagcccctccgcaggcccatggtcagcgcgtcccacccgggtctctgccggaactccacattgtctctatccaatccaccactgatgggcaggcctatgtctctgctgttgtgaatagtgctgccatgaacatgagtgcgtgtgttcttttggtataatgatatattttcctttgactaaatacgcaggaatggtattgctgggtccaatggtagctctgtttttagttcttttggaaaatctccaaactgctttccacagtggctgaactaatgttcattctcaccaacagtgtataagcgttcacgtttctctgcagcctccgcaatatctgttgttttttgacttttaaatagcagccattctgactggtgttagatgatatctcattgtggttttgatttgcatttctctgatgattagtaatgatgaacaattttttcatctagacagaaatcaatagggaaacactagacttgacatacactttggaccaaatggacctaaagacgttatagaacatttcatccaacagcaacagaatattcattcttctcaagtgcaaatgagacattatccaggatcaaatattaggtaacaaaataagactcaacaattttaagaagattgaaattatatcaagtatcttttctgaccacaaaattatgaaagtagaaatgaatagaaataaataataggggaaaatttgaaaatattacaaatgtggaaattaaccaacatgctcttgaataaacaatgggttaatgaagaaatcaaagggaagttaaaaaatatcttaagacagatgaaaatgaaaatgcaacgtaccacaacttatgggatgtaacaaaagaagttcttagcaggaggaaagtttatagtaataaatgccgatattgaaaaagaagaaagatctcaaacaacctaatgttacatttcaagaaactagaaaaagagaagagcaaactaatcccaaagttagcagaaggaaggaaataacaaagatcagagcagaaataagtaagagattagaaaacaaaagaacacatttgcaaaactaacagttcagtttttgaaaagataaaaacaattgacaaaactttagcagaccaactaagaaaaaaaagaagactctaataaaataagaaatgaaagaggagacattaaaattgaaactacgcaagtacaaaagatcataaaagaatactacgaacaattttacaccaacaaataggatgacctagaagaaatggttagatttccagaaacataacaacaatgaatcatgaaaaaatagaaaatctgaacagactaatgagtaagggggttgaatcagtgataaaagtgtcctagcaaagaaaagcccagaacctgatggttcatggattggaggaattaatattattaaaatgtctgtgctgctgaaagtggtatacagattcaatgcaattcctataaaagttctaatgacctttttgtttcacagaaatagaaaaagcaattcaaaaattcatatggaatgacaaaaatcttaagtagctaaagcacttttgagcaaaaagaccagagctggaggcatcacactacctgattaaagatatattacaaagttatagtattcaaaacagaaaggtactggcataacaacagacacatggaccaatgtaatgtgatagagagcccagacataaactcatgcatttgtgattaattgatttttgccgaagatgccaagaataaacacactatggggaaaggacagtttctttaataaatgatgcaggggaaatcaaatacccacatacagaagaatgaaattgaacccttatctcacaccatgtgtaaaaagcccactaaaaatggtttaaagatttaaatgcgagacctgaaaatgtaaaactactagaagaaagcatagggaaaaatgtccctgaaattaatcttggcaatactttcttggtgatgatctcaaaagctcaggaaaccaaagcagaagtagacaaatgggattacctgaaaccaaaagcttctctacaacaaagtaaataacagattgaagagacaacccatggactgggagaaaatatttacaaaccatacatggctaatatccaaaatatgtaagaaatgcaaacaacttaaatttgttagcaagaaaacaaataacgccatttaaaactgagcaacggacttgaatggacatctttcaaaagaccaatagatatataaaaaagtgtctacatcactaatcatcagggaaatgcaaattaaaacaaaacaaagagatatcacctcatacctgttagaatgactattatcaataaactaaaaggtaataagtactgacaaggatgtggggaatccttatatactaatggcaggaatgtaaattaatacaggcattattgaaatcagcatggagattcctcaaaaaactaaagatagaattaccataggatctagcaattatatttctggatacatagccaaagagattgaaatttgtattttaaaaatatgttagagaccagcctgaccaatatggtgaaaccccatctctactaaaaatacaaaaaaaattagccgggtgtggtttgcacctgtagtcccagctattcaggtggctgagacaggagaattgcttgaacctgggaggccaagtttgcagtgagctgagattatgccactgcactccagcctgggctacagagcaagactccatctcaaaaaaaaaaaaaatgggtagattttcctctaatttggttttaacgtctctctttgaagagtggctagaaactctagcctggctctgatgggctccagtggaggtggttgtggttgtggatgttttcggtgttcttttcatggaatacttccttatcctgatggagagctaatgcctaattgtcctatttatgaccaggtgtccctctcactggaaacttgttttcactggcagacaccattgtggcttttgtctgactagtgtgtccagttcattcctaccaagattgccactctctaagggagccttgtccagaaaaaaaaattaattttaggtgtgtcaggtgagacgccaagaagacacataaaaaaaaatagtataagtagttttattacttaaagattccagagagaagagggcaacttgcctcacaggcctaatgggagaaagggcatcccttagagacatgcatgtgcaaccagtgggtgggtagcgagagagagtgagtgacagaccagaaagccaaagcccttattggagtacacagcattatccaagcagggagtaactgattgctgggtttagagcaagcaggcatgatttcttgggagttaagttgtattgagaggtgttcactgctgcaaatctgcagtccatgtggggtgtggggatcagtgggataagtcaagtaggttgtatctaggtgtcccacacggaggtggtaaccaagaggccaaatatctggattgaccacctgaagaaactgggagaggagaactcaaaattgtgataagggtgactaagtcctgcttctggcatgaggaagttcaattatatattgaaaatgaacgctgaggtaacataaactcataagaattcactacagatatctgcactaccatgttcattgtagcatttttcacaatagctgaggtatgaaaggaacctaaatgtccatcaacggataaacagataaatatataaaagggatataatgtgatatatatgaaccacattatctatataaaatggaatactattcagccttaaagaaaaaagggaaattctgtctttacaacaacattcatgaacctgcaggacattatgcgaagtgaaagaagccagacacagaaggacaaataccacatgatctcactcttatgtggaatctaaaaaagataaactcatacaagtggagagtagaatgatagctacctggggggcaggggatggagaaaggggggattttaaacaagtagatttaaatgttctcactataagaaaaataagtatgtgaggtgatgactgtgttagctggacttaatcattccatattgcacatatacatatatcaaaagatcacattgtatctaatcaatatataaaattatttgtcaattaaaataataaaagattggagtaatatttaagatttttttaacattttgcaggaaaaatcttggaattgaatttaaaagacaactgggaaggcataaataatataggtcagtctcaaagagcccctcattaataaggaacagatatgcagtttagtctttatgtattctagtttttctgttgaatgactctcaaatctctcctttttttccagttgtcttgtacatttgagccttagccccacgggaaactgaaaaaaaaaatcggacggctcagtaaaacctcttcctttcattgtaaatgttactcacagcatcttttcccatgtttgttggtgacaaattcactgtcatctcagtaagagtataacatcatgctgaagatatttctgtgaagagttttgtactgagaacatcataccaggacaactccttgaagggcattaattgcagctttgggatttatactcccaaaggctgcagtcaatgaaagagtatcccgttattctttttgtttccataaagattacatttgctctgggataaagggtccatcccgtgataccttgaatgccctaaagtattcccacattctgctaaaaagcagatcttttggacaaactcaggctctcttttctgtagcaatgacaatcacagttatttccagactctgttcttcatagttagatttaaaacattggcaaaaatgttataagaaggcaattaggttgatgtttttaggttgtatggcaaccagagagccccttcatcagtttatacctgatgaggttgtaggccaggtagagagtgacagggaacagggacaaacacaggaaggtcagtactgaaagaagttggtgcacttcttaaggggtagacagcttccatatttcaaaattgcagaaagtgtagattttaaatgttcttactacaaaaatatgatggttgtggggtgatggatatgttaactagcttaatataatcattctataatgtatatatacatcaaaacattacagtgtactccataaatatatacaattattactagtcaatgaaaaattaagaaaacaaaccagatatagtataaaggaatggatgtgacacaaattggcataatgtctcttaataataattggggaaggaagagacactcagccatccattttccctatagtatttgatttaaaaaaagagagaagatattttattctacaactcataaaagctacatttgatagggtcttcatttccctcttttccaccaagaagaaaattgaagctgagacttttctctacatgagttctgggggtttttttgtcccttatttcctatcccttttatcaactccggaggaatgctgaaagatgggtcatataacagatagttatcagattccaccttttaattactgtaataaggaactcaggcagctgcattaggaaagaaaattaggtcggcatcagcaaaagtatccacagcatttgagttcaagtatcttatggcatattacctttcatcttagggagatttaaaaaaatccttggaattttcccatgatttctcaaaaggttaatgctcattccattaccaacaatatggaaaaatgtacagtatctttgtaccagtctggagcatttgcacagatttggcccaagttcaatgttcctagctctccagctgtaactcaaccagttaggcaactccttacatctttttcaagagtcaagattacaatatttgagttattaaaagtttttcaaaacactgaaggtgagtcgggtgtagatattagttttttgagacagagtcttgctctgtcacccaggctggagggcaatggcatgatctcagctcactgcaacctccgcctcctgggttcaagcgattctcctgcctcagcctccagagtagctggtattacaggtgcccactaccatgcctgcctggctaatttttgtattttttagtagagatggtgtttcaccacgttggtcaggctggtctcgaactcctgacctcaggtgttccacctgcctcggcctcccaaaatgctgagattacaggcatgagccaccacgcctggcctcttttgccaaatttatcagagagtataagaggaagagttggctgtggcaggaggggagcagaagggggatggcaaaactatttaggaatattgaaatgctgggttcctgtattttattgcaaaaactatatcataaaagagtgtttatctttctcatgcaagattggtaatgtgcaagagaaaataagcaactgaaaatcaagctatcaaagcatatttgaatttcttcattttaaaaaaataactacaaggtgaattttctggattttatacaatgttcacgtatctttctactaatattagttaatgtctgttcagaagctccattaaaaattgtggaaaacccagaaaatacaaattataaattgtgactcagaatttaaagtatagttcagttattggcctaaagcatatacagttttgtagaaaccatgtttaagtcttcttgtccttgtctaacaaacttgttatacattctttcaacttcgcataccacattcagacctctcttcactgttgtgcatccaaacactctccatttctctcttaccaacctatgtttttgttagactctgtaatctttatgtcttccagtaatatagtctcatttacctttggaagcattctatcaccgatcactctattttgctgtattaatcagctttgtgtatattgtgaatttttataagttggtgtgtgcgtgcatattctctttaaactttgatttgtgcattattttatttgtctagaaataaactgctagcataaatagcatttgattctttctataatcatattcaattatttcttttcagttaatattttaaagtgactatctaattgctttttaatatgggaaattcctatctataagtaagatcagtaagactgctgttattcctttctctgtaattgcaaaattggaaatagcctgaaaatataaaaataatttgactttttaaagtaaaaaatcatttttcataaatattgtgttcctgattatggactatcttagtcttcattaatccaaatgttaattcagggatgtatataaagaactcagtaacttgagaagctattgcttgtatctgtagctggataaatatctcaatgaagcatataaagggaactgtataaaaattctactaccattatggtgcacactctctggaagtgggatacttttgtcttcaatctgtttgcaagtgagcggttgacaatgcatggacagactttgagtttatgtggttctttctttaggtataagaaaaagatgaatgatgattaaaaaaaatgcaagttcggaagacttctttattctacttggattttctaattggcctcagctggaagtagttctctttgtggttatcttgatcttctacctgatgacactgacaggaaacctgttcatcatcatcctgtcatacgtggactcccatctccacacaccaatgtacttcttcctttcaaacctctcatttctggatctctgccacaccaccagctctatccctcagttgctggtgaatctccggggcccggaaaagaccatctcgtatgctggttgcatggttcaactttactttgttcttgcactgggaatcgcagagtgtgtcctactggtggtgatgtcgtatgatcgttatgtagctgtgtgtagacctttgcattacactgtcctcatgcaccctcgtttctgccacttgttggctgcggcttcttgggtaattggttttactatctcagcacttcattcctcctttactttctgggtacccctttgtggacatcgcctagtggatcacttcttctgtgaagttccagcacttctgcgtttatcatgtgttgacacccatgcaaatgagctgaccctcatggtcatgagctccatttttgttctcatacctctcattctgattctcactgcctatggtgccattgcccgggctgtactgagcatgcaatcaaccactgggcttcagaaagtgtttaggacatgtggagcccatcttatggttgtatctctctttttcattccagtcatgtgcatgtatctccagccaccatcagaaaattctcctgatcagggcaagttcattgccctcttttatactgttgtcacaccgagtcttaatcctctaatctacactctcagaaacaagcatgtaaaaggggcagcgaagagactattggggtgggagtgggggaagtgacagggaaatcatgttgtctgttgtcattgtttttcctagggtcttagccatcttgaaaggtggtttccctgcttctttgtgatttatttttgttctaacagctcacaaaacagaatagttcagtatcacatttgttgctctttttattatttagttctgaaatattatgttgagataaagtttctgattagtgccactttgttcttttacaattgtatattttatttctgtgaaaattgtggactgtggtttcaacgtaaataaatgtgcatgcgaatagttatgaggagattatttcaaaaatgttgggaatatttctaacaatgtgctaaattatgaactgatgatatatacagaaagagaagggcaatattgcaaagacttaggctaaaaaggtttttggttattgaataaaccttaaatgaagctaaaaatagtcacagcaaagaaaaatggtaaacataatgaataacattgtttaagatatggtaaaggatatatcataagtatttggttgaaagacactttttaaagacactaaattatctaatttatcctgtaggtctacatacttgtcacattgaacagtaaactaatatctctttaaaatggctctttcgttcatctgtccatttattcattaacttattctttattagctaaatcttattgaatgtgtactctcttccagtttgtgaaattcttggtaacgtgtataaatataacatactctgtctgaacagaacacactctctgtcaggaaaaatggcaacataaaagatgaagtatctgtgcatggcttaatttgtcactgggggtaatgctaatacattaagacagcttttaaaagtcagaaacaataaactctgattactcttcagattgtataaatctttcactttttaaaaatcaaaaacaaggccgagcacggtggctcacacctgtaatcccagcactttggaaggccgagtcaggtggatcatgaggtcaggagaccaagaccatcctggctaacaaggtgaaaccccatctctactaaaaatacaaaacaattagctaggcatggtggcacatgcctgtagtcccattgaagctaaacttttttttcactttacatgaacattttgaaatcactactaaattcaatattttcaacatattatttcatccgtatgtaaaattattgggattgcaattgttatgttttctataatcacatttttgaaaataacctgaaaatgctgaaaagaaaagttccttattcattaacaaagaaaaattttgtgttttatggaaattatcttccttagctaggttagaaatttctttcaattaccatttacctagaagtcaccataaaatgaatgggaagaactcgatagttattcttctataaggcaaatatatgaataaaatataaaattaaaaaattgttttctattttttgtgactttttattatggtaaaatttcaaacttagagaagaattgcaaaaaagtagtacaaagactgacatttaccctataaccagattaagcattagtttacattttcccccaaagctttgttatatcatctatctatctatctatctatctatctatctatatctctatcatctattatatctatctatctatctatctatctatctatctatctatcatctatctctttttctgcactagctgagagtaagttggagatgccacgtacctttacaccaagtacttttttttttaattattaggtcatttttattccttttaaattttctattttgtgttaattatttgtctgcattctatgtacataactgtattggagtttcagtttcatattaagttgtataaacttttgtgttccaaggttatacaaattcatatgtattttcttagttcattgcctcttattttggtttgttacaatttgtgatgttaaaagtctaaaaatgtgtgcgtggttaatactatctattgttcattaacattgtggtttcttccttttcttaatgctataatgttcttttattataattattattattatactttaagttctacggtacttgtgcacaacctgcaggtttattacatatgtatacatgtgccatgttgctgtgctgcacccattaactcgtcatttacattaggtatatctcctcatgctatccctccccccaccacacaacaggccccggtgtgtgatgttccccttcctgtgtccaaatgttctcattgctcaattcccactcatgagtgagaacatgcggtgtttggttttttgtccttgggatagtttgctgagaatgatggtttccagcttcatccatgtccctacatggacatgaactcatcattttttatggctgcatagtattccatggtgtatatgtgccacattttcttaatccactctatcattgttggacatttgggttggttccaagtctttgctgttgtgaatagtgccgtaataaacatacgtgtgcatgtgtctttctagcagcatgatttataatcctttgggtatatacccagtaatgggatggctgggtcaaatggtatttctagttctagatccctgaggaatcaccacactgacttccacaatggttgaactagtttacagtcccaccaacagtgtaaaagtgttcctatttctccacatcctgtccagcacctgttgtttcctgactttttaatgattgccattctaactggtgtgaggtggtatctcattgtggttttgatttgcatttctctgatggccagtgatggtgagcatcttttcatgtgttttttggctgcataaatgtcttcttttgagaagtgtctgttcatgtccttcgtccactttttgatggggctgtttgttcttttcttgtaaatttgtttgagttcattgtagattctggatattagccctttgtcagatgagtagcttgcaaaaattttctcccattctgtaggttgcctattcactctgatggtagtttcttttgctgtgcagaaactctttagtttaattagatcccatttgtcaattttggcttttgttgccattgcttttggtgttttagacatgaagtccttgcccatgcctatgtcctgaatggtattgactaggttttgttctagggtttttatggttttaggtctaacattgaagtctttaatccatcttgaattaatttttgtataaggtgtaaggaagggatccagtttcggctttctacatatagctagccagttttcccagcagcatttgttaaatagggaatcctttccccatttcttgtttttttcaggtttgtcaaagatcagatacttgtagatgtgtggtattatttctgagggctgtattctgttccattggtctatatctctgttttggtaccagtaccatgctgttttggttactgtagccttgtagtatagtttgaagtcaggtagcgtgatgcctccagctttgttcttttgggttaggattggcttggcaatgcgggctcttttttggttccatatgaactttaaagcagttttttccaattctgtgaagaaagtcattggtagcttgatggggatcgcaccgaatctataaattaccttgggcagtatggccattttcgcgatattgattcttcctatccatgagcatggaatgttcttccatttgtttgtatcctcttttatttcattgagcagtggtttgtagttctccttgaagaggtccttcacatcccttgtaagttggattcctaggtatttgattctctttgaagcaattgtgaatgggagttcactcatgatttggctctctgtttgcctgttattggtgtataagaatgtttgtgattttcgcacattgattttgtatcctgagcctttgctgaagttgcttatcaacttaaggagattttgggctgagatgatggggttttctagatatacaatcatgtcatctgcaaacagggacaatttgacttcctcttttcctaattgaataccctttatttctttctcctgcctgattgccctggccagaacttccaacactatgttgaataggagtggtgagagagggcatccctgtcttgtgccagttatcaaagggaatgcttccagtttttgcccattcagtatgatattggctgtggttttgtcataaatagctcttattattttgagatacgttccatcaatacctagtttattgagagtttttagcatgaagggctgttgaattttgtcaaagcccttttctgcatctattgagataatcatgtggtttttgtcttttgttctgctggattatgtttattgatttgcgtacgttgaaccaggcttgcatcccagggatgaagcccacttgatcatggtgaataagctttttgatgtgctgctggattcggtttgccagtattttattgaggatttttgcatcgaggttcatcagggatgttggtctaaaattctttttttgttgtgtctctgccaggctttggtatcaggatgatgctggcctcataaaatgagttagggaggattccctctttttctattgattggagtagtttcagaaggaatggtaccagctcctccttgtacctctggtagaattcggctgtgaatccgtctggtcctggacttttttttggttggtaagctactaattattgcctcaatttcagagcctgttatttggtctattcagagattcaacttcttcctggtttagtcttgggagggtgtatgtgtcgaggaatttatccatttcttctagattttctagtttatttgcatagaggtgtttatagtattctctgatggtagtttgtgtttctgtgggatcggtggtgatatcccctttatcattttttgttgtgtctatttgattcttctctcttttcttctttattagtcttgctagcagtctatcaattttgttgatctttcaaaaaaccagctcctggattcattgattttttgaatggttttttgtgtgtctatctccttcagttctgctctgatcttagttatttcttgccttctgctagcttttgaatgtgtttgctcttacttctctagttcttttaattatgatgttagggtgtcagttttagatctttcctgctttctcttgtggacattcagtgttataaatttccctctacacactgctttaaatgtgtcccagagattctggtatgttgtatctttgttctcgctggtttcaaagaacatctttatttctgccttcatttcgttatgtaccagtagtcattcaggagcaggttgttcagtttccatgtagttgagtggttttgagtgagtttcttaatcctgagttgtagtttgatggcactgtggtctgagagacagtttgttataatttctgttcttttacatttgctgaggagtgcttttcttccagctatgtggtcaattttggaataagtgtgatgtggtactgagaagaatgtatattctgttgatttggggtggagagttctgtagatgtctattaggaccgcttggtgcagagctgagttcaattcctggatatccttgttaactttctgtcttgttgatctgtctattgttgacagtggggtgttaaagtctcccattattattgtgtgggagtctaagtctctttgtaggtctctaaggacttgttgtatgaatctgggtgctcttgtattgggtgcatgtatatttaggatagttagctcttcttgttgaattgatccctttaccattatgtaatggccttctttgtctcttttgatctttgttggtttaaagtctattttatcagagactaggattgcaacccctccctttttttgttttccatttgcttggtagatcttcctccatccctttatcttgaacctatgtgtgtctctgcatgtgagatgggtttcctgaatacagcacactgatgggtcttgaccctttatccaatttgccagtctgtgtcttttaattggagcatttagcccattcaagacatttacaccaaatattttattcaatgtttcttgtctaagaagaaggatgttattttacataagtcctgcacagtacccaaatcagcaaatttaatatgggcacaatattattatctaatccatagtccacagtgagatttcttaaatagtcccaataattttgttaatagccactttttaaaaaaatcccagatgatacactgagaaatcacatctcactagtctccttccatctggaccagtgccaccgcctttgtttgtctacttaaacttgatacttttgaattgtacaggcaaactatttctctcaattagagtttttctcatgtgtcttcattattagaattagtctgtgtatttttaacataaatatcactgaggtgacatcatgccctgttcagagcagcatctcagcagtctcatgatgttggtttgtacaaatacaggtgatcttaagatcaataaaatcacttggttatgttggtgtctgccaggtttttctactgtaaacttcactgtttttcagtttgaaattaacaagaaagttgtgaggagatattttagactatgtacatgtcctgttccccatcaaatttttatccactagttttgcaatcatttatgtttttcttaacaccatcatcccttctatgtttattaattagggatctactgttaggaatggctttttcttcaccattcatttatttactcttactttttatatcagtacgagctttataattcttcttttgttaagttcattactactaatggttaaattgtcctacaattaaatgatggcaagcccttcaaactggattttattttttttacgtatcctgatgttttttggagcatttgtttactgctttttgagtttacctgattttttttttctctcaggtaataggaaatgaatgatgatggaaaagtcaatgctagctctgaggggtactttattttagttggattttctaattggccttatctggaagtagttctctttgtggttattttgatcttctgcttgatgacactgataggaaacctgttcatcatcatcctgacgtacctggactcccatctccatactcccttgtatttcttcctttcaaatctctcatttctggatctctgctacaccaccagctctatccctcagttgctggtcagtctctggggtgtggaaaagaccatttcttatgctggttgcatggttcaactttacttttttctcacactgggaaccacagagtgtgtcctactggtggtgatgtcctatgaccgttatgcagctgtgtgtagacctttgcattacactgtcctcatgcactctcgtttctgccacttgttggctgtggcttcttgggtaagtggttttacaaacccagcacttcattcctccttcaccttctgggtacctctgtgtggacaccgccaaatagatcactttttctgtgaagttccggcacttttatgattatcatttgtcaatacccgtgaaaataaactgaccctcatgatcacaagctccatttttgttctgctacttctcaccctcattttcacttcctatggtgctattgcccaggctgtactgaggatgcagtcaaccactgggcttcagaaagtatttggaacatgtggagctcatcatatggttgtatctctctttttcattccggccatgtgcatgtatctccagccaccatcagggaattctcaagatcaaggcaagttcattgctctcttttatactgttgttacacctagtcttaaccctctaatctacaccctcagaaacaaagatgtaagaggggtagtgaagagactaagggggtgggagtgagcctgtgtttgtgtgatattaacaatataatggagtctttcctcacaatgattcatccatctgttcatttatcaaccattcttttattcactcactctgttagcacttgctgagcatgtactctaacaaagtcgtggagatcctggtaacaggtaggaataaaacacattcagcttaaataccattcacttttggagaaaacagctgtgtaaaatcaagataaaacatctatagtgatgtttttccatggcacaaacctaatgaatacaagaaagacttttcctgattaaaaataaggcatgaaatttgttgtaaatattgataaaagtgaagttataattcctatgaaaagatgatactctcaattttaaaatatctagaatatgtcttttaattttttgctgtttaggcagaatacttttgtcttctatctttagtttagttgaatacacagcaaaatacttcaaatcctttcctccaacactacttattttttgttggatgtaaattttgagaggaattttggtccatattctttgatatccaatatcaatagtaagacaataagttttataaattgtagcaagagagatgttgaagcagtgtagcagaagtcggcgtccaagatccctcttttttacaaggcagtgagaaggatattggaggtgaaaggagctggtaaagctgacctatgtagcttataaagaaatggtcatcaccgtctaggtatacttaggtgaggtaagtgcttggagcaactgcattacctaaagagctatggagaacatttgaggcaaatagagaggctctgaaaatgacttgaagtcaatgggtgtataaaagaattatgtttaaatatactggaaaatttttatgataaaagctgttatatggaaaatgttagtttatttttatttttaagcttgttctaatttgaatatttatagttaataagtatattaggaatatcaatatatggtttcaaataaatatattttatagaagttatcattttgttctatatattattgtcaaccatcttcatctgaaataattgcgttatacctagagcaatttaaactgacagtcgtagtcaaatgatgtggaaaaatgactaaaggagaattcagtataatgtaacgtacttgcaatgcctgagttttctctataactggaatgtcagctgtagcttttgaggcctgtgagatttggatgtgattgattcacacactatttcctaaattataaaaataaaaatgcatctcggaacttccctccaatttctagtgtgacttgcaattgcattgattctgctgactttatcttctttctgcatctgtgactcttcctttatttctaactaggcatgaaaaatatgagtcatttgcccttgtccttaagcttacccaagaaatgaagaaccaagaatagtgtatgtaaaataacttttagtaaacaattgagaccacttagggtaaaacatcacataaaaacaaattttttaaaacttaaagaacatagcttagctctttgaactatttcctactatggaaatcttacgatttgtaacacttcctgtagcatcctggtttctcacctactcaaatatcctctccatctttattaagtgaaaagttgtatttatttatgatatacagcataaagttttgatatatgtataattatgcaattattattcaagctaattaacaaatcattaactcacatacttacctgttttgtggtgagaacatttaggatctgttatcttagcaattttcaagtatgcagtacagttttattaactatagtcaccatactatagaatagatctcttgaatttattccttctaactgaaactttgtaccctttgaccagcatctccccattttccctccctccactgctaacccctgacaagcctcattctactactttgtgcttctatgagttcattttatgtagatttcacacattagatcgtgcagtatttatttttctgtgcctggctcattttacttagcaaagtgtcctcaggtttgccatgtgtttgaaaatattaggacttccttcttattttaaggcagaatagtattctattgtatataaactacactttttaaattcactcattcattgattgactcttagattgattcaatactttggctattatgaatttgctgccatattcatggaagtggagatagctcttcaacatagtgatttaattcttttggatataaacccagaagtgtgattgatggatcatatggcagttctatttttatttattattaattaattaattaattaattttttgagacagagtctcgctctgtcgcccaggctggagtgcagtggtgggatctcggcttactgcaactcccacctcctgggttctagcgattgtcttgcctcagcctccagagtagctgggactacaggtaagcaccaccacgcccagctaatttctgtatttttagtagagacaggatttcttgtgtgtgtgtgtgtgtgtgtgtgtgtgtgtgtgtgtgtgtgtcctagcaaatctttaattaccctaaggccgatgtagtttctcgtataagttcttatgaaatcttttatttttcattatttttatgtttattttactttaagttctcggatacatgtgcagaatgtgcaaatttgttacataggtatacatgtgccatagtggtttgctgcacctatcaacctgtcatctaggttttaagccccacatgcattagatatttgtcctaatgctctccctctccttccccctgaacccgtgacaggccccagtgtgtgatgttgccctccctgtgtccatgtgttctcattgtttaactaccgcttatgagtgagaacatgcagtgtttagttttctgttcctgtgttattttgctgaaaataatggtttccagcttcatccatgtccctgcaaaggacatgaactcattcttttttatggctgcatagtattccatggtgtatatgtgccacattttcttcatccagtctattattgatgggcatttgggttggttccaagtctttcctattgtaaatggtgctgcaataaacatacatgtgcatgtgtctttatagtagaatgatttataatcctttggatatatacgcactcatgggattgctgggtcaaatggtattgctggttctagatccttgaggaatcgccacactgtcttccacaatggatgaactaatttactctcccaccaacagtgtaaaagcattcctatttctccacagactcgccagcatctgttgtctcctgacattttaataattgccattctaactagtgtgagatggtatctcgtggttttgatttgcatttctcgaatgaccagtgatgacgagctatttttcatgtgtttgttggctccataaatgccttcttttgagaagtttctatttatatcctttgctcactttttgatggggttgtttgttttattttcataaatttgtttaagttcctcatatattctggatattagacttttgtcagatgcatagattgcaaaaattttgtcccattctgtaggttgcctgttcactctgatggtagtttcttttgctgtgcagcagctcttcagtttaattagatcccatttgtcaattttgtcttttgttgccgttgcttttggtgttttagtcatgaagtctttgcccatgcctatatcctgaatggtattgcctaggttcttttctagggtttatatggttttgggttctacatttaagtctttaagctatcttgagttaatttttgcctaaggtataaggaaggggtccagtatcagttttctgcatatggctagccagttttcccaccaccatttgttaaacagagaatcctttccccattgcttgtttctggtagagatgggatttcaccatgttggccaggctggtctcaaactcctgacctcaggtgatctgccgacctcggcctcccaaagtgttggaattacaggcataagccactgcgcctggccctattttaaatttatttaggaaacttcatagtgttttccctcatggctgtcctaatttacatttcaaaaaacaatgtaacaatgtataagaattctcttttctccatattcttcccaccacctgttgtcctttgtgtttttcataatagatctaactggtgtgaggtatgaggtgatagctactggtgtgggcctgaactttaggtccagtggaacctagagtggtggggatcaacctgaagcctggaactggcctggttctagagtggaacttgctgccttaggggcttgtctggagcctgggtttatggggcccagcttatatgtgctggtctggaggctaggcccttgggtactggcatggatcttgggactacagagtctgacctagggggccaactggcactggaaagtcctattttgccgttttattgatatcacttctcactctttaaattttttttggctttttaattttctgggctcttttctccttcttctcttacaaaatatatacattttcttttatatgtgtagactttttgttttcttttgggaggttatgttgggaacaggcccccaaatctggccataaactggccccaaaactggccataaacaaaatctctgcagccctgtgacatgtttgtgatggccatgatgcccatgctgaaggttgtgggtttaccagaatgagggcaaggaacacctggcccacccagggcagaaaaccgcttaaaggcattcctaaatcacaaacaatagcatgagtgatctgtgccttaaggacatgtttctgctgcagataactagacagagcccatccctttgtttcggcccatccctttgtttcccttaaggaatacttttagttaatctataatctatagaaataatgcttatcactggcttcgtgtcaatcaatatgtgggtcaaactctgttcagggctctcagctctgaaggctgtgagtgccctgatttcccactccatactctatatttctgtgtgtgtgtctttaattcctctagtgccgctgggttagcatctccatgatcgaggtggtcttggcaaggttataattataggatatctaatattgaatcctagtcatattaacctgtgctatttaatttgtaatctgaaagtgatcagttactaataattcccccaaagtgtaacacagatattattgtttttattgttttgtacttttcaaaccagtcaagcaaactttatgcagcagaacaacaagaatgagttctctcactttatcaaactgaagggaggagataggtgcttgcataagctctggcaacttgtatatgaaaaaatcagggtaaggacaatacatttttagctctgacgacctgttcctatgtcaacaacactgaaggcaaagtagaagccctgagatgctccccttgtcaggcctaaacctcatgtcaacgtttgtgaactgggatttccaaagcagaaatgaatttatgcggcaagcaattttactgtagaactaacagtgaagccagctttttcccagataggaatgatgactaactgcactgaagcatcagcttctttttccctgtaaacttctgtcaggaataccacaaaagtgtgattgtgttctccttagtgcatcctatcagtatgtacatatttctttattctgttatgggcaatattggctttgattacttggttaatgttgtatctgccaggcatctttactataaaaattagtgtttttctcagtaatatataagtgtcatgtggggaagtatgttgagattaggtagcattctgttttttaactagctttcatccactagttttattagtaagcatcccttaatattccttcccagaaacaattattactatagtggtttccaagtaatgattcttaaagttccatcattccttccaaatttaataatttgtgtggcaggctaaatacttcctctccttctctcaaatgatcacaacctaatcactgggataagttattatatattaccttacgtggcaaaattaattttattttttatattttaagtcctggaagacatgtgcggaatgtgcaggtttgttacataggcatacatgtgccatgctggtttgctgcacccatcaactcatcatctacattaggtatttctcctaatgctatctctccctagccctcccaccttctaacagaccctactgtgtgatgttcccatccctgtgtccatgtgttctcactgttcaactcccacttatgagtgagaacatgcagtgtttggttttctgttcctgttttagtttgctgagaatgatggtttccagtttcatccatgtccctacaaaggacataaactcgttcttttttatggctgcatagtattccatggtgtatatgtgctacattttcttattccagtctatcattgatgggcatttgggttggttccaagtctttgctattatgaatggtgctgcaataaacatacatgtgcatgtgtctttatagtagaatgatttataatcctttgggtatatacctagtaatgggattgctgagtcaaatggtattgctggttctagatccttgaggaattgccccactgtcttccacaatggatgaactaatttacattctcaccaacagtgtaaaagcattcctatttctccacatcctctccagcatctgttgtttcctgactttttaatgatcaccattctaactggtgtgagatggtatctcattgtggttttgatttacatttctctaatgaccagagataatgagctttttttcatatgtttgttggctgcatcaatgtcttttttagagaactgtctgttcatatccttcgcccactttttgatggggttgttttttcttgtaaatttgtttaaattctttgtagactctggatattagccctttgccagatggatagattgcaaaaattttctcccattctgtaggctgcttgtccagaaggtttcttttgctgtgcagaagctctttagtttaattagatcccatttgtcaattttgtcttttcttgccattgcttttggtgttttagtcatgaagtctttgcccatgcctatatcctgaatggtattgcctaggttttcttctagggtttttatggttttaggtcttacgtttaagtctttcatctgtcttgagttaatttttgtgtaaggtgtaaggaaggggtccagtttcagttttctgcatatggctagccagttttcctaacaccatttattaaataaggaatcctttccccattgcttgtttttgtctggtttgtcaaagatcaggtggttgtagacgtgtggcattatttcagaggcctctgtcctgttccattggtctatatatccgttttggtacacataccatgctgttttggttactgtattcttgtagtatagtttaaagtcaggtagcatgatgcctccaactttctccttcttgcttaggattgtcttggttatacgggctctgttttggttccatgtgatatttaaagtagtttttttctaattctgtgaagaaagtcagtggtagcttgattgggatagcactgaatctataaattactttgggcagtatggccattttcatgatattgattctttggtatgtttttgcagtggctggtactgatttttcttttccatatttagtacttccttcaggaactcccgtaaggcaggactggtggtgacgaaatctctcagcatttgcttgtctgtaaaggattttgtttctccttcacttatgaagcttagtttggctggatatgaaattctgggttgaaaattcttttctttaagaattttgaatattcgttctcactctcccctcgcttgtagggtttttgctgagagacctgctgttagtctgatgggcttccctttgtgggtaacgtgacctttctctctggctgcccttaacatttttttctttcatttcaaccttggtgaatattatgattatgtgtcttggggttgctgttcttgaggaatatcttagtatttttctctgcatttcctgaatttgaatgttgacctgtcttgctaggttggggaaattctcctggattatatcctgaagagtgttttcaagcttggttccattctccccatcactttcaggtacaccaatcaaacgtaggtttggtcttttcacatagtcccatatttcttggaggctttgttcattcattttcattcttttttctctaattttgtcttcacgctttatttcattaagttgaatttcaatctctgatatcctttcttctgcttaatcaattcggctattgatacctttgtatgcttcacaaagttctcgtgctgtttttcagctccatcaggtcatttatgttcttctctaaactgattaatttagttaggaagtcttctatcttttcttcaaggttcttagcttccttgcattgggttaaaacatgctcctttagcttggaggagtttgttattacccaccttctgaagcctacttgtgtcaattcgtcaaactcattccccatccagttttgttcccttgctcgtgaggagttgtgatcctttggaggagaagaggcattctggattttggaattttcagcctgcaaaagggtttttatagatgtgattaaattctcaaccttgagttgggattattatcctgtattagccaggagggctgacataatcacacatatccatataagagagagggcatgtaagttctttcctgccacattcttagtcagagagaagatattctgctgctgactttaaagatagaggaatgggccatgagccacggaatacaggttgcttctagaagctggagtagttgaggaaacatgttctgtcctagagcctgcggaagatgtgcagccctgtagatccaatttagtctttctttctccagatatataagatatttttgttattttaaacaccaaatttgtagtaatttgttttagcaacaatggaaaactaatagagttggcattctatatgaaggaatagctttcctttgttcctgtgtgtgtgtgtgtgtgtgtgtgtgtgtgtgtacgtgtgtgtatcaggtattatttatctatgtgtctatccatatatcttaatatggtcttatgcattcttatttcattctatcattattttgatgctgaaatggtcagtgttttggctagagaggatcccttctgggtggcttatatgtcttttttatatgtctccatacttcttaaaatattttcttactgttggcaaactcagatgaacttgacatatctgacacttttctttgggaggaacagataactttgtttatcttaggtcaaatgacaaaaactttgaataaagcaatggggtttcctaatgaacaattcactagaaatgcatggagtagataacaccaagagatggtaatattgttggcaaatatttattttgttataacaccacatttctttaccctctcaggaaatggaaagtttttgtattgtgcttgagagtggggcaatggtgaagaacagtgactggctatgggtttggggagtcatttggcaggagtgtaaatccttgaaatttgaagatctttcaaattaccttgattctcctcaacaaaatactagcaaaccaaatccaacagcatataaaaacccaatttcttagctttttgttgaaatagctatttcctcacgttttctatcttctagaggtgacctatattccttggctcatggcccattcttctatctttaaagtcagcagcagagtatcttttctctgacctccagcctccctcttatatggacacaggtgattatattagcctacctgcctaatccaggataatatccccatctcaagattctgaatttaatcacatctataaaagtccttttgccatgtaaagtaacatataatcacaggctccacagattagggtgtgagcatttgcatcgcagagaaaaagcctaccatgaccccttgcgtcccagggataaagcctaccatgatcaagtaggctttatccctgagaggaaaggttggttcaacatatgcaaatcaatacatgtgattcatcacataaacagaaatgaaaacaaaaaccacataattatctcaatacatgcagagaaggctttcaataaaattcaacatcccttcatgttaaaaaccctcaataaactaggcattgaaggaatatacttcaaaataataaaagcaatctataaaaaacccacagccaacatcatactgaatggaaaaagctggaagcattccccttgaaaaccggcataagacatggatgccctctctcaccacacctattcaacatagtactggaagtcctggccagagcaatcaggcaagagaaagaaatgaaaggcatccaaataagaagagaggaagttatactattcctggttgcaaaagacatgaatccgtatgagaaaaccccatagtcttggtccaaaagctccttgatctgataaacaacttcagaaaagtttcaggatacaaaagcaatgtacaaaaatttagcattcccatacatcaacaacattcaatctgagggctaaatcaggaatgccatcccattcacaactgccacaagaagaataaaatacctagaaattctgctaaccaagaacgtaaaacatctctacaatgagaattacaaaaaactgctgaaagaaatcagaggtgccacaaacaaatggaaaaacatcccatgctcatggatactaagattcagtatcattaaaatggccacactggtccaaagcaatttatagattcagtgcaactcctatcaaactaccgatgacattgttcacagcattagaaaaaaactattttaaaatttgtatggaaccgaaaaagagccctaatagccaaggcaatcctaagaaaaaaggaaaaagctagaggcatcaccttacccaacttatactagagggctacagtatccaaaacagcacggtactggaaaaaaaaaaaacaaaacaaaacagatatatagaccaatagaataaatagagaacccagaaatagtgcaacacacctacaaaaaaatatgatcttcaacaaagctgaccaaaacaagcaatggggaaaggactccccattttataaaaggtgctgggataagtgactagctctgtgcagaagattgaaactggatgccaactttgcaccacatacaaaaatcaactcaagatggattaaacacttaaatgttaaaatgaaaactattaatataaaaactctggaagataacctaggaaataccattctggacataggacttgggaaacatttcatcatgaagatgccaaaagcaattgcaacaaaaacaaaaattgacaaatgaagcctaattaaactaaagaacgtctcacagtaagagaaactatcaacagtggaaacagacaacctacaaaatgagagaaaatatctgcatacaatgcatttgacaaaggtctaatatctggcatctagaaagaacttaaacaaatttataagaaagaaacaatgccgtttaaaagtcagcaaaagacatgaacagacactttccaaaagaaggtacacatgcggccaagcatatgaaaaaatgctcaatatcattaatcattagagaaatgcaaatcaaaaccgcaatgagataccatctcgtaccaggtggaatggctattatcaaaaagtcaaattattaataacagatacatcaaggttatggagaaaagggaatgcttatacactgctggtgggaatgtaaattaccttagctattgtggaaaatggtgtaatgattcctccaagaacttaaaacagaactactcttccaccaagcaatcccattagcgggtatatacccaaaggaatataaatcattctaccataaagacatatgcacgagtatgttcattgcagcactgttcacaacagcaaatacatgaaatcaacctaaatgcccatcaacagtagattgggtaaagaaaatgtggtacatagaccccatggaatactatgcagtcataaaaagaatgaggtcatttcctttgcagcaccatggatggagctgcaggccatcatcctaagcaaactaaatggaaaagagccaaataccacatgttctcacttataagtgggagctaaacataagaacacatggatactagaaggtgaaccacatgcactggggtctacttgacggtggagggtgggaggaggaagaagatcagaaaaaatacctattgagtactatgcttattacctggatgatgaaattatctgtactccaaacccctgtgatgcgcagtttacctgtataacaaacctgcacatatacccatgaacctaaaataaaagttaaaaaaacctaaaccccaaattaccttcaacctttatgagtttttacatttgaaagttaaatcgataacttaatgacaataattcaactctctcatgcttatccccctcatctaacccaaaacaaaacaagatgggatgctgaggtgaggaacctttgaatttttaaatagtattaggtctagcagaacctcagaaagacatgtttacattaagaggactttgactattgatatgggcatgtaagttctttactgccacgttcctagtaattcctgaattgcacatgtatgaaatgacattaattctctcatactttagggttgcttgttagtgcctagaaggaatacagtctctgtggccagtctccttggatcaacaagagccttgtagtttcccatttttcatgcgctaatagtgaaaatgtttagaaagccccatctatcctcccacattggcatcccactgatgtgctgtcctggttgctaggtgcagatttaggttccaagcagaacactgctagtgttctctgcagtttgttgtagaatcatagtgtcttggcaaccaaaggcagatctggtgctatggaggacctgcttactgctatgaggtgttactttatagaggtcctggagaagctgattgaggccacgtcaatgttgcaaggagacatgagactcacatcagagttctatggcttaacatgggggatggtggtaagtgcggctctatttggattttgtaattataaaagcccactttatgtagagagaaaaaaaagagtttaccagagaagtttcttctgtagttgaagacaaatgtaatgttttaataaattaggctgattaaaaaagaatatgagcttggtgtggtggctcatgcctgtaatcccagcgctttgggaggctgaggcgggtggatcacctgaggtcaggagtttgagaccagcccggccaacatggtgaaattccgtctctactaaaaatacaaaaaattagccaggcatggtggcagatcctgtaatcccagctacttgggaggccgaggcaggataatccttgaacctgggaggcagaggttgcagtgagccgagatcacgccattgtactacagcctgggcaatgggagtgaaactttgtctcttaaaaaaaaaacgagtatgaagagtataaattatttttcatggagtcttgcccttagaacaaggcattaaatcctctaagtgtataggaaatttgagttcaaaatagatgctttgaaaaaaaggaatgtttttgaaaaatgcgaatttttacagatttacaatgtagaagtgcagttgtgttccatggatatattgcatagtggtgaagtctgatttttcaatgtatccatcatccaaataaaatacattgtcctcagtaggtagtctttcatccctcaaccctttcccagcctcccaccttttggagtctccaatgcctatatttcactctatatccacatgtacccattgtttagctcccacttataattgataatatgtagcatttggctttttgtttctgagttctcttaagccaatggcctccagttacagtcacgttgctgcaaaagacatgatttcagtctttttatggccaagtagtattctaaagtgtgtatatatgtataccacattttagaaatccaatagtccactgatggacactcaggctgattttattactttgctattgtggatagtgctgcgatatacatagacacataggtttctttttgatataatgatttctttacctttagcttgatatccagtaatgggattgctggatcgaatggtagctctatttttagttctttgaaaagtctccatactgttttccacagaggttgtactaatttacattcccaccaatagtgtatgtaatccttttctctataccctcggcaaaatttttttttttctgaatttaataatggccattttgactggcataacataatatctcactgtggttttaatttgcagttctcttatgattagcatttgttcatatgattattggccatttatatgtcatctttaaaaaaaaaagaacaccttaaagttcagaatgaattacattcatggctaggtttagaatatgggttccgttactggaagatgtgttgaagtcttttaaatagtgagaagctaatgccaaaatagccttaaaactatgtcagaagaggaaaaaaaacaacttaagacagcaaaaaaaaaaaaaaaaaaaattgggtttggatgagcatttcaatcttgagaaaaacctaacgtgtttgcaaaagaaactcaaggattggatgacaagtttaccactgggcaaaaggatatttatatccttggattaagtgttaagtgataagaaatcaaatcaaataactgagtaaacagttgatgaatattccctactatacttggagaagataaaatggatgctgggacttagaattggatcaaatcagaacaagtaccaatcaatgttcagtcaaaggtgattgatttgtttatgcttcttaaaatacttttttttttcttttttgtgatggagtcttgctctgtcgcccaggctggagtgcagtggtgcaatctcagctcattgcaacctccatctcccggtttcaagtgattctcctacctcagcttcccgagtagctgggattacaagcatgcaccaccaattctggctaattcttgtatctttagtagagacagtgtttcaccctgatgcccagtctggtctcaaactcctgacctcaagtgaccctcccactttggcctcccaaagtgctgggattacaggtgtgagccaccgtgcctggcctcttacaagactcttcatggagagagaaataaaatagaaattaggttgtatgaataacattgaatcttgaagcctttaaaaatcacactgaacatattcggcatgaattaagcattttttaaaattatactttaagttctggggtacatgtgcacaatgtgcaggtttgttacataggtatacatgtgccatgttgatttgctgcacccatcaactcgtcatttacattaggtatttctcctaatgctatccctcccccagtgccccccaccccccgacaggccctggtgtgtgatgttccccaccctgtgtccaagtgttctcattgttcaactcccacttataaatgagaacatgcagtgtttggttttctgtccttgtgatagtttgctgagaatgatggtttccagtttcatccatgtccctgcaaagggcatgaactcatccttttctatggctgcatagcattccactgtgtatatgtgccacattttctttatccagtgtattattgatggacatttgggttggttccaagtctttgctattgtgagtgccacaataaacatacgtgttcatgtgtctttatagtataatgatttataatcctttgagtatatacccagtaatgggatcgctgggtcaaatggtatttctagttctagatccttgaggaatcgccacactgtctaagcatttgtctagtaagaaaatgtaatttgaaagtaaggttcagaacatttaaccaaatgttcaagtaatttctaaactgtattgagaaaatggaataaagtttcatagattatttgtattagaaaaagttaattagaaagttttcaaatgcacattaagtgatagatacacacacacacaaaacaaaaattcttagagaaaaaaatgaaaaaactgacctgttcttatcaaagacatgatttcccacatttaaaaaaccttgtaatagttgatttacagttaagttgactgatggaaatctcactgatttaagaaaatctatatgaaagtccagataccagtattttttcctataaaaagctacgtagtcaatattaaggctttgtaaaccaagacacaaaactggagtattatgaaagtacttatataacaaaattaaaaataaattctcacaatttttttttgttgctgaaacaaaagcactgaaaataataaatactagcaagaatgcaaagtgagggaaactctctttgattgctggtagaaatgcaaagtggtgcaaccactttgactatttggcaatttttataaagtttaatatagtcttgccatatgacttaacaatcacattcctaagtatttaccctagtgaattaaaacttaggtccgtgtaaaaatctgcatgcaaatgtttatatcagtttcattcataattactccaaactgtaagcaacccatgcccttcaacaggggaaagataatcttgggtatttccacacaatgatctatgattttgtggaagttgattgatcaatgaatactattgatcaatgggatggaatgagctactgatacatgcaacaacatgaatatatgttaagggtattttactaaatgaatgaagccagacttcaaagtctgaatattgtatgatttcattcataagacatctggggaaaaaaaacccactgggatggaaacacatcagtggtatccagggcttagtgtaagggagattagtttattacaaagaagacacacaggggaatttttaaatgatggagttgttttgtatggtgctgcactagtaatacacaagtccatgatttattaatccctaagtagtgtatcacaaaattgcactcaaatgcatgcaaataaacaagcaaaaatatcaccaagatgtgggaagatcctagaatggtatgacagtggcaaatcaacctcactttatataaatatgtaagctaacaacactgaaaagggtagagaagaagtaaaaagtggcctaacttaccttgagaaataatgttttgattaaaaaatgtcagactgtagacaaaagtaactttgcataaatatggtattctgaatagtaaatttgtttctcatgcgggttcagctaattctgtaattgcttcacatgcataccagttgaacaaaaatattaaaatatgaacagtggcatccaggtttctccctgttggtaagagaagttacagagaagcaagaaaggaaggccagaatgaccattagggactgtgttagagtcagagttatcactatgacctcatgtttaaacacaagcccaaatgcacatggacacacacagatggacaaataaggaaacaacgacagatatgtgtgtattcagggcttactgtgtagacacacattacctagccctttctgctgaaatagcctagaaacaatgttaccctcatagcaatgtgcacatgtcacactcagataatgttttctaatgccattttccagtgaaaagaaacagagatcgttggagaaatgtctgattataagatatttctaagcctggtgaagaaatatataagagaagcctggagaagaaccagtaataccagaaatcagggaggggccctgaagagaaaaggataacaaaaggatgaagacctgtccaagggacccagcagctaacttgaaagagctctcaatgggtaaagctggagcaatttcaacaacaaaataaataacatatcactggattataacctgaagtataaaacgtatgagtccatactcttataaataaatgattgaataaatacataaatgagaagaagggagaaatcttccttactagtctattaatagtccccactttcagatgtggagctcatgatctcctttgttaagtgtaggctggactcagtgactgtcttccaaggaatagagtatggacaggtaacaattgtaagtttcagttttatttagtgaaaacactaccttaaccaagtgattaaagtcagcaccatcagtgatgccatgtagatattatgtaacccctgctctgatgggataaaaagggcactttacctctgtggtctcctctgcaaaaattcaaaggcccagtgtaattgatggcagctgaaacccatctggactgtgatgccggctgtagtaggggagatgcaggtgtggctgtgcgctccgtggagcccctggagccgggaacaggcggaagccccaaccccttatgagttgacagggcaagagccttgtgctccccaggctcagctgcagttgcccagcagcggctgtggacaggacatccctgtgcgcttggggttcaggagcaggcagaagccccaccctccctggtgcagctgcagctgctcaagctgtgtctacaaacctgggcatccctgtgttcttgggtgccaggagtaagagccctgccctcctgggcgcagctgcagatgcccaagctgcagcggcagacccgggcatctctgcactcttgggggcctgggaaagccctttttgcccccgcaggcttggaggtgcctgctcctggtgtctgatctctccctgctcctggtgcgtgctctgatctcggagcgtggttgaggccaggcccaggtgctattgcaacctggcctggtgtgcccacacttggggcagcactgacatgccagtcttctgccacctcagccccctctgggctttgggcaccagtaagcaagggagggaggctggagggggtgctgctgagggcagcttggcgctggcctgcaggtgcctcttggcaggaacagcctgggcaccgtcaacagtggcaggaggcccacaggctcctgggcagaaagggacgggtccccggtgaggccccaccttcaactcagggaaggattgaagcctgggagacgggctgccagcctcgcagactggagtggggacttacgatgctttttccaagcctgcccgtggctgcccaaggaccaatcagcaagcacttcctttcctctgaagtccataaaaattcccagactcagccagacacaaaaagatgtcaggacaaccagctgcagagaggaattacctaccctagggtctcttttctgctgagacctgaacactctgtgggatgacctgtctgaggagaggagctacccactccagggtctcctctctgcggagagctgaacactcgttaggacaccctggctatggagaggagcgggtttcctctcagctgttctattgttcaataaagctcctcttcaccttactcaccctccacttatccacatacctcgtgagtgtgggacaagaacttgggacccactgaatggcatggctgaaagagctgtcacacaaacagggctgaaacatgccctttcctcacctcattgtggttgacataaaggagataagagatgcaactctttggggagcccagacctaggagctccctgagccagggctgtgacacccttttgggtggttctgtggttcctggtgcggaagctgcttgcagtacacctggtccagccgcagacttgcagggagatggcacccctgtcagtgcctggaactgcctgccctgctgcagcaagcatgcctggctgtgtgcagtagctggaccccacacttgctccctcatacacacctgccacagtaaacatactgcagtatgttgggagatattggattttaccaaaagctttttcagcatctattgagatgatcatatggcttttccttttaattctgtttatgtggtgaatcacatttgtagatttgcagatgttcaaccaatcttgcatgccagaaatagagccttcttgattgtggtgtattaactttttgatgtgctgctggatttgtttgattagtattttctcaaggatttttccttctatgttcatcagggatattggatggaatttttttcttttctttctttttttttttttttattaagctaactcacctaacttagtgtgggtcacatatcttggcttgataatcccaagctgtgcttagaaacccaggtagcaccaggacatcctgcagctcagggttgggctctggctgcactgtgggatctgatatgcttctgggttgctgggaaagtactcaggtgaagcaaggcattcagctgggctgtgcaagctgcacaatgcacctgcttctccagggcagctaggcataggacctgagaggagcctgcaggcaggagggcttgcagaacagatgtgtcttagtcccatagggaagccagccctgctctcctttggcttgacagtcagctgagtcaagagccttgcagagggagatgggaagctctcagggatgtgtgtctatggctaccctccaccaaagctgcccagcacacaaaagctcccaggctctgcactgtctgaagtactgtctctgcctgttccccagggagatacccctgccagctaacacatttatgggggatatggggtctctcatagctaggatcccagaggtacatgacaagagtgagctgtccctcagttccctggctcaccaatttcccaggagccatctggggctgggaactagccctggcattcaggtaccacttcagggtttccagatttctgactctacagcctcagcttcagctttgcttctccatacactcagtgttttctctcctaagatcacacattgactttgtatcctgagactttgctgaatttgcttatcagcttaaggagattttgggctgagatgattaaatcaaccaatttatgttgattaactcaataatttggtctctctcggtgaaagcagtgcttcctggctgcaactaattggacatcttgtcccttcccatctgtgtaacacattttttatacatgctttattttgtcataattttagctttacagaaaagttgcaaagatggcaaagaattcccatatacacctcaaccagtttcactttcacttaatgttacatttctctggtacatttttcaaaattcagaaactaacattggtatgttactactaccaaaactctagactatctttggatttcagcaagattttctttaacatcctttttttgttgcagaatcccatccaggacactccattgcctttagttgtcatgtgtttcagtttcctgaatctctgttatcttgtttttcatgatgttgataattctgagtactgctcaggtatcttacagaatgcacttcaatcatggtttgtccaatgttttctaatggttatgttacgggatccttgggttatcacttcaccagctgaaaacctctgtggctagtggcacttatgctggggttttgctcaggcccactggcccactcagcctggcagcctgtgctcagcttacattaccagcctggatactgcacacagccaggcatgcttgctgatatttctggttctagatccttgtgggagtgtaaattaattcaaccattgtggaatgccacagtaaacatacatgtacatgcatgtttatagtagaatgatttataatcctttgggtataaacccagtaatgggattgctgggtcaaatgatatttctggatctggttctagatccttgtggaattgccaccctgtcttccacaatggttgaattaattacactcccaccaacaatgtaaaagcattcctatttctccacatcctctccagcatctgttgtttcctgactttttaatggtcaccattctaactggcgtatgatggaatctcattgtggttttgatttgcgtttctctaatgatgagtgatgatgagcttttttcatgtttgttggctacataaatgtcttcttttgagaagtgtctgttcatatcctttgcccactttttgatggggttgtttttttcttgtaaatttgtttaagttctttgtagactctggatattagccctttgtcagatggatggattgcaaaaattttctcccattctgtaggttgcctgttcactctgatgatagtttcttttgctgtgcagaagctctttagtttaattagatcccatttgtctattttggcttttgttgctattgcttttggtgttttagtcatgaagtctttgtccatgcctatgtcctgaatggtattgcctaggttttcttctaaatcttttatggttttaggttttatgtttaagtctttaatccatcttgagttaatttttgtataaagtgtaaggaagtggtccagtttctgttttctgcatgtggctagccagttttcccaacaccatttattaaatagggaatcttttccacattgcttgtttttttcaggttcatggaagatcagatggttgtagatgtgtggtgttatttctgaggcctctgttctgttccattggtctatatatttgttttggtaccagtaccatgctgtttttaaaacctgttttataaaaaagggaattattgtgagacttcaatgagccagtgcatacacatctagattttggacagtgcctgaaacataggaaggatctaatgaatgtaagccagttatcattaatagtatgattagcattaatcattagtaataatcattactcataatattgagtcattatttcagcttgtcatgtgtatgaaaaagcagagatataatttattattggtaatcccagtgcttattgtaattttataatattatgatatgaaatgattaaatgtatatgtcacttctttgtttctagcatagtgcagagaacatagtttcctcataagtgaaagtcaagtcaatagtaggagatatttggttatctgaagggcatagctgataacagtaattgactcagcagctcttccttcttattctattattttcacagcctctactcctcttcaccttttatatggcactggtgccagttcatttatcaattttttttttttttttttgcattatcagtaaataaacttatcccttgacaagagaatggtgattccactgttatcttaaaccttttcttatttatgcatcctgcatatatcaaaagaaacctcaaataccactgattctttttcaattaaaaaattcccactgacttttttatgtgtggagatataataagcaaattttcattcaaaagtttcaaaggataagaaggatttttggaatcactaaaaatacttgatatttatttcaaggttccctggaaacaaattggacattctgattacttaacatgatgcaacccagaggtaatgatgtaggttagatgatcttgaaagacccttcccaatcatggtaacataattctctgtggtagacaccactcgcctttattctaagtgtcctagagatatccatgcctttctttgtgttgtgtttcaaggaagtctggtgcaaagactgatacatgcaatgatgttttgagctttcaactcttttgccattctgactcaactaccttttgcccacagattgagaataaaattatcatgtatcttgcactgccttaagaacatataagtaaaaatcttaagatgaggtaaaagtgtgttacagataatgtcttcagtcaccgggatatttttgactgacatgggctgtccttgccaggttcctaatggatttccacaatgagaagctgattttatagacattagtaacatttgcactgtcacagagagaaggttgtggcttttaataaaaccagccagtatttattaaagtcctactattctcacaatgttgtgtcctttattttaaccttagggattctgagtccctcaagtttaattggtcattgtgtccccagaggcaataagttaactctattcccaattgcactggtggcataatactgacacataggtagttcacaaattctaaaactagggtgaagattagagttataaaacatgaactatgaaaaataggtttggaatgtattaatttgaagagcataaggctaaataaacatacagccacaaatttctttatttttcatttttaaattttatagctgtattgagatataatttatttacaatacagttcacccatttaaagtgtacaagtcaatgatttttggtatatttcattactaatttataacattgtggtaatatataacataaaatttgccattttaactatttttaagtgtacaatttaatggtgttaattatattcatactattgtgtaaatcttgccactattttctaaactttttcgtcatcccaaacagaaactctaacccttagtgataactctccattcccctcccccatcccctagtaactttcaacctaccttatgtctgtatgaatttgcatgttccagatatttcatattattggaaacatacaatttttgcccttttaggtctggcttattcatttagcataagatgtacatattgctttatagcctgctttttcacttagcagcatattgtgagaatgttcatggttaggcagggactaggcagtggagttgggtggaattttgcaaaccatacttaggagtttggattctgttttgtaggacttggtctcagggtcaaatagggagtcttttgatggtgtatataggaaaatggtatttctattgtttactgatttttttgtgatgaatatgcttggactaaatctcccaaagatctgtggttaaaatattatttatatcatatgatgtcatttaacataaattaacacactgaagtttaaggttagcattaattcactggagcagaacaagtagaaataatgagattgcaactggaatagtttttgaaaataagaagatttatgcaatgtataacttaataagtgctcaccaaagattttcagtgaaataaagaaaattataattaaattaaatatctagtatcagcctggatatagcctggatatatattgtttgtttgttttgttttgttttgttttgtttttaagacaggatctcactcccatggcccaggctggagtgcagtggtgcgatcacaggtcactgcagcctcgacttcccaggctgaggtcatcctcccgcctcagctgcctgagtagctggtaccacaggtgcacgccaccaagcccagctaatttttgtatcttttgtagagatggtgttttaatacattgcccaggctggtctccaactcctgggttcaggccatccacctgccttggcctctcaaagtgctgggattacaggtgtgagccatggcacctggccacatgctcgtattttaatgtatttgtttccccttacttttcttttgtgtatcatttttttgttttgagatggagtcttgctcttttcgcacatgctggagtgtaatggcacgatctcggctcactgcaacctccgcctcctgggttaaagcaattctcctgcctcagcctcctgagtagctgggattacaggcacccaccaccatgcctggctaattttgtatttttagtagagacggggtttctccatcttggtcaggctggtctcgaactcccgacctcagatgatctgcctgccttggcctcccaaagtgctgggacctcacctgtagtgtgagccacctcccggccatatcatgtatttttataaattgtaaactgacatatgtaaaacaatcattttctaatttataaaattttcttgatatgcagtttttgaagctatgtaacattcttttttaaattaataattcatatatacattatatatgtacatatatatactttctcattcttctacaattaaatatattttctgaatttgtcaccttatactatagatcattcagaataaagtgctttccatatgtgatctcttttagactgtttatcagaaatgatgtcagtgaattaaaagtattagtataggctgggtgaggtggcttacactgtaatcctagcactttgggaggctgaagtgggaggattacttgaattcaggagtttgagaccagcctgggtgacatgatgaactcctgtttctactaaaaatgcaaaaaaaaaaaattagccaggcatggtggtgcatacctatagtgtcagctactctgaagactgaggtgggaggattgcttgagcctgggaggtggaggtcacagtgagccaagattgtgccagtgcactccagctggggcaacaaagcaagaccctgtctcaagaaaaaaaatttttagaagtgttagtatataacaaatacatatttcgaattgcttttaaaaggaatagaattgtttggacttgaattataatagaaaagtaattttagacaacttataaaagcataaatctcacaaacatcattgaagagatatacatatgtgtgtgtgtatatatatatatatatgcctcctcttttgattttccttatatcttttcaattttaatgttgaatcctaaattatcctcagggttgtaaagttgcttttattttccctattcccctttaaatcctaaggtatacaatagtggtacttcctgtcatatcttcatttgcattagcagtcagacccctgaaataaatcagacagatattgggatgacagtagcaaattaccacagattgaaataagtagtagccccaattgaatctgctggaagagatatgttatccttgatagagtatattagcatgttactgagtaccccgtatgcatacattgatctggtaaatgttttctttttcatccttatcaggaaacatgatcagggagtttgcactcacttggagctgacaatactataccatgtcccagagctatgctaggtttttcatcttccatcataaaatactgaagagaacgggactagctgtatattctgtaggccgtcacactggccaactatatctaacacatcatgcgtatcagacaatatgaacaagaagtggtcaatacattaaaagccttgataagacacatgtgatccagagagtgagtgttgcactccataaagattcagggacctaaagcataaaagttttaagtgtttattggtctggggcactatgagacattctatctaaagtaaaggatacatttttgcattatgcatttcctatcataaaaaagaagcaaagtgcctggcagacctctctgtactttgtagtaagcatatttgacactatcgagtactgttctaattcatccactaggtgctgtatttgaatggccttcagggtaagaatgggctctatagcaagtctaaatttcaccataaatgaggtggaatttatggcaagtttatgggaagatcataacaaaattcttagggttttgataaaactctgctatctacagcacaggattgtatacatttcaaaaataaagccctggtgttttactgaattctgggtagagaaataacatctgaccatggaacaacaaataaccatgcaggcaaaactacccatatgagctggggactgtctgaaccatcaagttattaggttgagtggatacagagcaatcactgtaacacggcattagtacatccaggattgaccacagcatgactagagggcagaggcaaacagtatgagcaagtagcccaggacttcatgctattcaccacttttgcatcaatatctcttcttcagaccacacttacgcctccaagagagaacacttccaactctaatggaggagaaaaatgtcaagcttggttcattaatgggtcagcttggtatgtgagtccaagtcaaaaaggatgaagataaattatagcctcgcttacggtgatcttgaaaaatagtagtgaggaaaacgcctcccaatggacagagtttcagatggtacccagtcattcactttgtgtggaaagagaagtagtttgaagttagaatatgtataactcataggtagtgataaatggcttaggaggcttttcaggtggctggaaagaaaaagatagaaacacttggaaaaaagaagtctggaacagaggcacatgcataaacatataagagtgaaggtatgaagtgttgcattatttgtattacatgctaaaactacaagatggaatccatcatagaaaatgaattaagcaactaggtagaaaacgtgacttggcgagcagttattgtcaagagcttctgacatttgccctcattatcctacctgcaatgctagagcaatgagcttatgaatgaagccaccatgatagtagggatagaagcaatgcatgggtttaacagcatgcattatagccactggtcaaacatccagtcttccatcaataagtgtcccatgcaatgactggataaaatagtttcccatcaaaagatcaaccagttatttaatgtcaagttgatgacactggactttttctactttgaatgtagcaattttttttggtaggaatagatacacatactccaggcatgggtttctattcctgaacataagttctcagccagcatgactgtctaaaggcttataggatgtttgacgcagcagcaggagatcccacataccattgtatcagaaaaaagggccgacttaatggcaaagaaagtgtaggagtggacttatgaccatggaatccattggccatatcacatattgcactatcataagtgatctattagagtcatggagggatctgttgaagctacacctgaaattccagctcagatgaaatgtcatccttcaagacccagtactttaaatcaattatctttctatggtgctgtgtcctcactaggaagaatgcatggtttagaaaccaaaaggtgaaagcccttcttagaatccctaccagtaactcatttgagaaatttgtgttttttttctccacaattataagctctgtgagtttagaggttctagctctctaaagggaaatattcccactagggggtacaaaaggtacactaggaagtgtatactttgtttaattatgatggtaaatgaccaaaggcaatgagattaactaaaaaaagccatagtgatcaggggctcagacacttccggatcatgacaccaggtaaaccactgagagcaggagaggtgccagataagggtgagagcaacacagaatgaatagtaagaaggagatggtgaccatagtttgtaggacttaagaccagccgcagtggtggtcctcttctaagtttcctccagatacagaggcccactatagccctgtaagagcttttcccagatcttttttaatcaattaattaattaatttttttatactttaagttctagggtacatgtgcacaacgtgcaggtttgttacatgtgtatacatgtgccatgttggtgtgctgcacccattaactcgtcatttacattaggtatatctcctaatgctatccctgccccctcccccaccccacaccagatcttatacaaaggagtagatctgaaattaaaggaatagacagtgttggaagttataatgctttactcagataacactttcagaatgaaggcattattacttcagctgctagatgtgctacaggtagatagagctcagctgagatccttctttctgggttgcctcagctaaacagagttgcttcatctaaacatatggcccttttccatgtaatctgcattcaacactgaccaacaaggagatttaaggcttgccgttggcctcagctcagaacatcaatgaattgtcatctcatattgagaacttcctacagggttcagtgaaactttagtagtttgcattacaaacttccaaagtaggtagtttgcattacttcctttcctcaatcatgctacccaccctttcctttgaaagatgttgatccaaaaaatgttccctagtaaactttctaaatgctgatctccatccctgagtcggcttcctgggaaactccattctcatctctctctctatatatatatctatatataaaatatatacattatatatgtaatatataaaatacatgtataatatataatacatatgtattatatgtatacagggaacaagaagagtgaaacatttaagaaagaaagttaatttagggatgcattagccaggttgtgtgtaatgagagctcagttctctaaaggccttctgaaaagcacacaggatgtttttgcctgaagggagagctgctggaccatttattcctagttaaaattcttcattgttggaggatttcccctagggtcattaagcattttgtacttctaggcagcacttgtctatatgccaaatgggctcccatggtgtcagacaagccttggggccaagggaagccctatacagcatacttgaggtaggtcactgtcagtatgtgtgagataatctgagttcacacacaactgtcccttgcagctctgctgaaattagagctgggctgaagagatgtgatacactggtactagaggcatctactttagaaggtgagatagaaatgctgtattttacatttacaaccataggaatggaggtgtgctggcttttaccatgaactcccccagatagtgttctgaaaagcagaggaggccaactaaaataaaatcacagggaaaactatatttgcaggaagaagataatctcaagagaagcagagattaagagtattcttgaattttgcatagtaaaaaccatctagtctaagactgtctcccctaaccaaggaccttttacaaatagttgatccagggggaaaaaaaaaagcatctacttcaatgattagtaatttaaaaggaactggaagagataagacatatggatgcatacatatataaaaatagctagatagagacctgcaggtgataatatacaagaaagaaaatggggaaaggaaaagcaatctgaatagacaaaaaacgaaaccagtagttagtggttatgaagtggatgaaaatcgaagggtgggataagaggcaggttgattctgaacatggaaaaatctacaagactgagattctttaaaacatcaaactactcttctactttaatataatatcaaactcaaattcacaaccaaagtggtaacatttcatcactaatttgaaaaattctaaataaaataaaggaaaaataacacacacacaaaacagagaatatatagattttctagaatgcacagcatagtaaagacaaacatgagtaaaattatggtgaaatttaagccatgagggtcagtgcatcttaatgccctgggacattgtacttgagggtttaccagtagattaataccctttaagcatgagaattactgattgagagaacttcaaatgaatttgcttctagtgtgttgataaagttaaatgtgatttatcataggtgggtaagaatatggttggtagataggagacaacagggctaggatattcagaaaataacctccagcaagctttgtaaaagcaaaagcatatattgatgtaaaaactttacatatgtaattgcatgatataccatcatgttgctcaaactgcattaaagtgtgattgagaattcaccacaatgtatgttgatgtaatagtaaatatcagattatgtcataatttttcttagaattatggcttgagtgatctatttgacacagttattattgttaatgattttaaatattttcatctaatttcaagcttttggttttctttaatgtactttatcattcttcatcaaagaaggtcatgtagaaatataatgtttcttttttctagatgttatttttactcatgctctgcaaaactttggtaataaattttggtttctggaacaatccattgaacagtttcatcatcatgataattattgctaacttacattgaacagttactttgtgccaagaacactttttagtatttcccacatttgcacatttaatctctccaacaagcatatgtaggtttttaattttgctcattttccaaatacaaaatctaaggaaagaactaaagtaagaacaaaaatgttaactacttttcctaacatcacacagcatgaaggtggctgagggagaattcaagctcatcaataacagacagagtgaaaaggaggaatggagaagaggagaatgagagagaaaaaagagaagataaagggagaagatccagggagagaagaggggaagcaaaaaagagagaaacatgggagacagagagtgaaataaatcaagatacaaggtcacagagaaataagagaacaaaagaaatagagaaagttataaagctaataggcagtgattagaactatgtaataaatgtggtaaatgtatactctttgagagcacagatgaaacacatctaatatttagcaaagtgattttcactagcaggtgcttacatgtattttatataatatttataatgaacaattttaatcagagacaaaatatgaggaagatgtaaaagaggaagagagagagtgaatgatgaatatcaaagattaaagcacttcactaaatcttgtattttttcccaaaatacagctggtgaaaatcttatccttgagtagaaaggaatcaaacaagtcatataccacccgtcttcctgtctgtactggaaccatcacaggcttttgaggaactacttttgaaccgttccccagagaggcatttgccccagtagctatgattataatttgcaatgacagccacagtgatttcatccttctgggcttctctaacaagccacatttggagaagatactttttggatcatttttattttttattttttgactcttgcaggaaatatggtcatagttcttgtgtccttgaaggatccaaaactccacatccctatgtatttctttctttccaacctttccttggtagacctctgtttgaccagcagctgtgttccacagatgttgattaacttctggggcccagaaaagaccatcagctacattggctgtgccattcaactctatgtttttttgtggcttggggccacggaatatgtccttcttgttgtcatggctgtggattgttatgtagcagtgtgtcatccactgcaaaataccatgatcatgcacccaaaactttgtctgcagctggctatcttggcatgggggactggcttggcccagtctctgatccagtcccctgccaccctccggttacccttctgctcccagcggatggtggatgatgttgtttgtgaagtcccagctctgattcagctctccagtactgatactacctacagtgaaattcagatgtctatcgccagtgttgtcctcctggtgatgcccttgatcattatcctttcctcttctggtgctattgctaaggctgtgctgagaattaagtcaactgcaggacagaagaaagcatttggcacctgcatctctcaccttcttgtggtttctctcttttatggcactgtcacaggtgtctaccttcaaccaaaaaatcactatcctcatgaatggggcaaatttctcactcttttctacactgtagtaaccccaactcttaatcccctcatctacactctaaggaacaaggaggtaaagggagcactaataagattggggaggaggacctgggattcccagaataactaacaaggttaacatatgtttacctttgcttaacctaagaatagagaacaacctcatcacaaaaagctggagatacacctcctaagccaaaagtaggagagaaagagctgcattctgttcaggttgagatttcagtttccttcatcaatcaattgggcccttaaattcttcatattgtggatttagacacagtatggtataaaaattaatatatttaatagctattgtcttgaaaaggacacaatgcaattgaatgggggaggaggagaagacacaagaaacacattacttgcaaaataaaatactaagtagtacgtttcatgcctttctatttcgttctttttttgttctattttcctacaagctccaccagtgctttcagtcccaacaagatttctaaagttttgagacagaaacttcttgatcaacttatatgtacccctatactgtaatatggcaggtcttggttttaattgcttctgtctctctgtctcagcatgaccactgttgacctgtaatgtgactttcactatccaatgcaaagtgtttgccatgccaaagtccacatttactgctctctggtgctgatactatgatgagtgtgtgtgcaagtttctcagtttgagccttgatattctgggcccccagttataggaatagacttctgtgtttttcttcattctgaggccttattgtaacaaaatggctatctttttatcagacccaattattctttcactttatagatatttatggctttcctattatatacctattatgtttcagatggtagttatgtaatagtagataaaacatataaaataatcaacatcgtggaacttataacaatatcatctcttgctcttagactctttcacagtattgatataatattagatttgcctcattacaaaacccatttgtttattgctttactcttagctattatttgtcttctccatttacaaccaaactttttcaattttggaaggaatattaggttcagccactgtgttgcttcagattgcagctaacaacactggtctagcaagtgcttccccctcagttcactcctgttcagagacagtgacaatgtgatagaaaataaaaacccattttctgaggagaaattcaagcaggctgcagaaatttgcataagtaagaaggagccaaatgttaatcaccaagacaatggggaaaatgtctccagggcatgtcagaggtcttcacagcagcccctcccatcacaggcccagaggcctaggagggagaaacagtttcctgggccaagcccagagcccccctgctctatgcagccttgggacatggtgcctggtgtcttatctgcttcagctccatccttggctaaaagaggccaaggtacagaccgcttcagagagtgcaagccccaagcattggcagcttccacatggtgttggtcctgtgggtgtgcagaagacaagaactgagctttgagaacctccgcctagatttcagaggatgtattgatgtgcctggatgtccaggaagaagtttgctgggttggcaagagccctcatggagaatctctgctagggcagtgcagaagaaaaatgtggtgttggagcccttacacagagtacccactggggcactgcctggtggagctgtgagaagagggtcaccatcctccagactccagaatgatagacccactgacagcttgcactgtgtgcctggaaaagctggagacactcaatgccagcctgtgaaagcagccaggaggggagcaaagccacaaggatggagttgcccaaggccatgggagcccacctcttgcatcagcttgacctagatttgagacatggagtcaaaagagatcatttatgagctttaagaattgactgccctgctggatttcggacatgcatgggtcctgcaacacctttgttttggccaatttctcccatctggaatgggtgtatttacccaatgctgtactcccattgtatctaggaagtaactaacttgcttttgattttacaggcttataaccagaagggacttgccttgtctcagatgagactttggacttggactttgagttaatgctggaattagttaaggctttgagggacttgttggaagggcataattgtgttttgaaatgtgaggacatgagacttgggaggggccaggcacagaatgatagggtttggccttgtctccacctaaatctaatcttgaattgtagttcccataatccccatgtgtcttggtagggacctagtgagaggttgaatcataggagtggttactccccatgctgctgttctcatgatagtgagtgagttctcacaagatctgatgattttataaagagtttttccccttttgccctttttctctcttctgctgccatctgaagaaggatatgtttgcttccctttctgccataattgtaagtttcctgaagcctccccagccttgcggaactgtgagtcaattaaacttctttcctttataaattacccagtctcaggtacgtctttattagcagcatgagaatggactaatataccttctctcatgttaactgccctcttggatcagacgttgtagagataatttatcttgttcccaacataatttttctcttgaggggtggttttgaggttagtggtctgagttcacactcatcaaaatctgagcttattctagcattaaggtctgctttggcattctcttttaatttcattttagctattacagattacaataagcaatggattatatatttttcttttaaaaattagtttgcatttctttatggatcttgtgaaccagctctctgggggttggatttgtatctaaattatagaaaatttgaatgatcctgggaagacaggaggcttttctctccagcaatttgcagagttgggtctgtagttaagatcaagagcagttgacagaattggtagcagcacaagagatcatgagccacctaaggtgacctaactgagttgtttctggagatctaatttttttttttttagatggaatctcactctgtcggtcaggctggagtgcagtggtgccatctcagctcactgtaacctctgctgcctgggttcaagcaattctcctgcctcagcctcctgagtagctgggattagaggtgcctgccactgcacctggctaatttttgtagttttagtagagacgggatttcaccatcttggccaggctggtcttgaactcctgacctcatgatctaccctcctcagcctcccaaagtgctgggattacaggcatgagccaccacgcccagcctctaatttctttttttaaaatttaatttaatattaagttccgggatgcatttgcaggacgtgcaggtttgttacataggtaaatgtatgtcatggtggtttgctgcacctattaacccaccacgtaggtattaagccccacatgcattagctatttatcctgatgctcttcccacctatccccgacaggtcccagtgtgtgtggttcccctccctgtgtccatgtgttttcattgttcagctcccacttataagtgagaacatgcagtgtttggtcttctgttcgtgtgttagtttgctgagaatgatggcttccagctccatccatgtctctgcaaaggatgtgatcttgttccttttcatggctgtgtagtactcagtggtgtatatgtaccacattttctttatccagtctatcattgataggcattggggttgattccatgcctttgctattgtgaatagtgctgcaaagtacatatgtgtgcatgtatctttataataaaatgatttatattcctttgggtataaacccagtaatgggattgctgggtcaaatggtatttctggttctaggtctttgaggaattgccacactgtcttacacaatggttgaactcaggcatcctataaaatgggagaaaatttttgcaatctatccatctgacaaaggtctaatatccagaatctataaggagcatcactgattattagagaaatgcaaatcaaaaccagaatgagataacatctcacaccagtcagaatggccattattaaaaagtcaagaaataatagatgctagcaaggctttggagaaataggaaacagcttttacactcttggtgagatctgatttcttaattaacttagatactaatttattaatagacaggaaactaatttctaatttcttaacagatacatactggcttctcagccaggctactgacctttaccccttacatacacaccttaacttctgtatgaacatggatgtgactgcattgggtaagagaggggagaggtggtgggcagcagaagggtggcctctttgaggaagatgtgggtaaggatagcaggattctacttaggggtagacagagcagtgaactttctgtggatcagagacctgggttttgattctatgcttgtactgtcagagtatgcatattccatgtagattgtagcctgtggcagagagaagaaagtagtcatccttcaatgccttctcatcagcttcaagataatatgccattcattcaaaatatttttattgatctcttagtgtatgcaagaaaatatgtggaaggcagtggtgacttagagactctaagaaactggtttgactatagggtggcaatcgggggaacagtattattaacagcctagagaggttggtgtggtcttgtgggttgtatttggactttaacagtaacagaggagcactgcagctatttaagcaggagagactctcttgtctttctctgagattctctccctatgtctctaaatctgtttctctgcagagaaacagattttatccatatgctctttatccatacagcctttatctataagctcttcatctgtttctctttgtttctctgcttctctgtctctttttgtctctctactgctttgtttctctccattactgttattgtagcagtatctatatatctctctgggtctctttccagcactagacctccctgtgcctttaaggaaataaaggagcatagggcattggacctgaagcagtatcttttgtttcttaccctctactagatcttgctgtctgcccttgtctctgcgtattagtgagcgtcctctcctgactcaacaaagaaagtaagagaatgaagtgtatagaactgaaaatgccttgacgtattctttttctcaaatgtgtccagatttttccaaaaagattgagctttagaatttatgtgatatctaaccaaagtgaacaagttctgtgtccccaaaaactcaggatccacctctatgacaaggaggagctcagataatccataatattccaattcttaccactattaaaacagttctatttagcatccaatactaggttcataattctgaacatcagaatctcagaaggttttctgcattcataaatattttactgtttttaagagggttcaatgtattggtttttgatacttcaaaaatgatcgtgtacatgtggtagatgtatcagggtcctttggttgtaaaaaacagaaaatacctctggccatcttaagaaaaataaattttggttcaaccattgtggaagtcagtgtggcgattcctcagggatctagaactagaaataccatttgacccagccatcccattactgggtatatacccaaaggattacaaaacatgctgctataaagacacatgcacacgtatgtttattgtggcactattaacaatagcaaagacttggaaccaacccaaatgtccaacaatgatagactggattaagaaaatgtggcacatatacaccatgggatactatgcagccataaaaaatgatgagttcatgtcctttgtagggacatggatgaaactggaaaccatcattctcagcaaactatcgcaaggacaaaaaaccaaacactgcatgttctcactcataggtgagaattgaacaatgagaatacatggacacaggaaggggaagatcacacaccggggactgttgtgaggtggggggagaagggagggatagcattagtagatatacctaatgctaaatgacagttaatgggtgcagcacaccagcatggcacatgtatacatatgtaacaaacctgcacattgtgcacatgtaccctaaaactaaaagtataataataatttaaaaaaaagaaaaatcaattggagaagataaaattttataattaaaaaaagaaaaataaattttggaaagatacagtgagtaccccaccaaatgaaagaaccagtaggaccatcaggttactggagtaaaatgaatcagggtaggcctggggaattcagattggaagtaacaggtaaccccatttggacaataccatctgttgaagattcaaagcactaagaaaaactgacttgttgaaattggatcacttgttcacccttgtgatcagtttcatggtcaagaactcactggaactgtatggaataggaatagccgttctcatgaatgttcacaaatagagaagaacaagggatggcaacttctgttatagcaactcattattaactgcctgtttgattatggtattctattcctctctctgccagggaatagaaagtttttgcgttttgcttgagaattgggaaacatgaagaacagtgactgagtaaggggctgggtgttatttatagcatgattataaatcttttatatttgaaggattttcaagttcccctttgattccttgagttgttacatttgaaattcaaggtggtaagttgattatgagacccttcattctccttcttctacacttgagatctgaccaaacacaaaaagggataggttgccaaaaggagggctttgtttaacttttttggagtattagaaccttatgggtctaaaaaaatatttacattaagaaaatattgaccatgaaggagagcatgtaaactctgtaaaacaatgaaaacaaacaagacagaagtttccagtttccccattgctttctacctttgtcctcttttcttattctttcctattcttttattcttttttccttctttctttctttctttcctcccttcctctctcttttcctttctttcttcctctctctctccccaccccatgaaccttgactaactaacaaacctcaaggcttgcaaaaatcattctcaaaaaatacttttctgatgattattgacatgaaaggggcatgaaagcaggtataagcccccaactgagattttaaaatagaaagctgttgccttagccaaaacaaggtaacgaggatgtgtactccacttcctctatcctgtaaaaactctgatctgacttcagtaaggagatctcaatgctcatcacctgaataaagtctttagcctttgagtcacatcattttcatttgacagtctttgtcagtgattcccgaatagcacatgtgtaaaaatacatctatcctcccagattttgggattgatggatgtggccttggatgaacaaagtcccagtggccaatcttccctggtgaaagtcagccttgtacatctaacttaaagtgtgctatgaaatgaaaatgttttggaagcactgcctgttctcccctatcgccacgcacactgctggtctctcttggttgccaggcactggtttaggttctgagcagaatactccacagtgttctctacagtgtgttgtagaataggagggtcctggcaacctgaggcagagctggtgttacagagtacctgcctactgctataaagttttactttatacgaattctggagaagctgagtgaggccatgtctgttaccaggagacatgagactcacagcagatctctctggcttaacatgggagatggcggtaagtgcagctatatctgaatttttttaatagttaaaagctgactttatccaaatagggattaatgtattttccataagaagttctgttctaggtagaaaaaaagtgaagattttggttaggttaaactgatttttaaagtataggaagagttacagatttttttcttattgagtctagtcttgagaacaatttatcaagaactccaaatttaaaggcaattagttaattaaaaacttgaaagatctaactctttgagtttaaactggactcattagaaaacaaatggaagaaaaaggtatctaaatgttcataatgacttgtgtctgacattaaaacaaggattcagtcactagaagatatgtcaaagtccatcagtaccaaatggataaagccaaaataactttaaaactatatcacatgaatgaagacttgccatagcaataaagtagagtttggatgaagacgtccatcttcgggaaaacccaaaatagcttttacaaaaaactgaaggatgaaataaaagattaagccaacagaaataaacatattgaaaatatctcaataaacagaaataacttagagtgagtcagaactgagaacacctagaacaagttccaaagaacaagaaaagtcagagcaaatctctgacacttggagaagataaaacagatgcaggtatgttagagtggatgtaataaacaaatcagaacatgtatattacttagatagctctcaataatctgatttatgcttttgtaaaacctttggagaggacacaaacaaaatatagtctgaattatctgaaaagaataaaaggaacacttaaaatcatattaagcatataaaataaatcaagaatctttggaccagaaaatgcacagtatgaaaattagcttcaaaatctccaggacagagattaagtaattactgatatatatcaagaaaatgaaataaaacttcagatcatttacatatttatacatcttaaagtagaagaagataaccttcctcattgattctaccttcaaatagacctgcttattattattattttttaatgtttttgtagagatggagtcttgctattttgcccaggctagtcttgaactcctgggctcaagcgatcttcctgcctctgcctcccaagtgctgggattacagatatgagccaccgcaactggccctgaacctacttttaacatccaggaaaaatagccatatcattgttgtcctaaagtaattaaaaattctctctattctagtttcgttgctgttaaattgttatacaggagttcaaattgaagcttaatagaattaaaactcttaggatggtgttttctaaatatatattacttaaatgttggggaagagaaataattttaatttctagatagtacatgtacaatattctgttttttaaataagttatactgggagatttataaaggcagttgaacaatcaaagacatttggaactaaatttctgtatatcaagtgctgtatttactatagttaaaacacaagtatgaaaacaatggaatgtttatatacaaatgacttttataaatgactatttcaattgatttaagaagtcatttgatgaaaatgataaaatagttagagatatagtgggaaaaaaagagacccacggggaaacaccatgatagactgagccaaatgtagagctcagctcttcctcccccaggatcataacatatcaccagataaacctttgaaaaaaaacgaaatgcaacaaaacaaaaagaaaatccagaaaagaaaatcgttagttttctatatttcataatttctgtactttccctcttcccaggtgtctgttcacaccttctctgctctatccaagcgcacatcctttccttttcttcactcccaactgatgcctctgcttttcaaaacttcagagaaaattggagaaatcagaaaggaatttctgtcagatttcaatactacctcaacacacccacctgcttctatatccatgtattctactttctgtctggttcctattgatgaactgtttgtgctctagcaaaggctgatcaatcctctgctgccctggatccatcccctcaccgacctaaagactttgtttctgagttcaccctcactctcctgctgtgtaattttgcatactctataggtcattaccatagaatacaagcatgctgccattacatccatcttacagaaaaaaactctttctgccttctcttgacctccctttccctacagctattgaatcatttcttcctgccttcagcaaagcactattcatgagttttctatgctttctgtctctaagttgtctcccactgttctctcttgcttccattccagtgtggctgttgccttctttttctctagcaaaactcctcccttagtgtcacagatgacttccttattgctaaatccaatggtcagttcttaatcttcatctcacttgacctactatactaacagcctttgacacagctccttcttctttgatatactttaatactttcttttttttttctttcacccaaagcaagattcctcctcctatcttgtctgaaggagagtggcgagagcagattaaagcatccgtgaggcagccttctaaaatttctcaggaagtggtagccagtgtgaaaatgtatcacctcaccttgcttcatatttcccttctctcagttccctttttttctcacctttgctgccctctatttgcattcccaaataaaacattaatatttccttttttgcctcaagctctgatttttagagaatctaggctaagaaactcactaaggtcttaaggtaaaaggcccagcaaacacactgttattttgctcaatcacagaacgctctagctattcaaaaactgttttctctttctccttcttccacatgcacatccactaaaccccggaccccaaattgacagaccattcccaaaacaataacttctgggtatgtgctggccctggctggtggcttttcagtgtagagttccatggttctaaattcttgacttcaggaactctccaaattatataaaatggcaaactcagaaccagttatttatacttgaaatacatttttatgtataaagaaataaattttaacatattaaggcatagtcacaggacaaatgacaagtattgtcattgtacagttatctagtgtgtttggattataaaggcacacaaggatttttatggtagggaagacattgctattgttttcaacagagaaataggaggattaggcagaggaagggaattaggagaaatttcaccgaaaaagcccatgaagctttgggtaaggcagacgaggctggatatgacaggaagaatttgctggatacattatggtctgctggcaccatctggtgttgaacccaagaaaaaacggaagatgaagaaaaagctttcagaaagtaatggagccaagatgaggcccactgagggtcttgttcaagtgacatcgggatctcgtaacagaacaaatggctgtcaaagtagctggaaaagccctaggctatatctccttagggctccttccttccccaactttccagatgtcagaccctaacctacctcagagatagcactttacctttcaccctctcttacccatgttcctccaactggtgccattcccatctgactatcccatgcccacacccagatccagaagctggataaccccgcctccctaaacagcagatgccatgttggagaggtgaatgcaattggaatcactgagcatttacttcacgttctcatttccaccgattttacctcatgcctcactatttaataatataaaattaaagtaaaatcttcccttcaaaaaaatttttaatgaaataacattgctctgaaaaagatagttcaacatatgtcaaaatggccttttctcttattataaaaatgaaaatttaaaaccatacataatgaaacaaaaggacactaaaaacattttatcaaatatgtttgtatatgttcctgtgcttttgtgtttctatgtgcacacctatgctttgtgcactagaatgactgctgctagtctcactctgaccctgtaggcttactcccatgtaataaaacatgcctcttgatatagcaatatgccctgatttatggcagtgcttctatgccaggagcatttttgcttcctagggcatatttgacaatgtctggaggtatttttgcttgtcacaacttggggggaaaggagatgctactagcatctagtgcacagaggccaaagatactgctgagcatcctaaaatgcagaagagagaccctgacaacagaaaattatctgttccaaaatgtccatagggctaagggtgagaaattttgatttataaaacactggtacccatgtcctgtttggatctgagctcttttccttttgccaagtgtgcatagtttcaaagcaggccccagatggaattctgtgaactctctgtttaattgaagatggaaaagatatcattaattactaactgctggtgaatgtcccttcttgtgaataactgaaataaaaaatcatgttatcaagtgttagaatgagtgatttggcctgttcccccagtttgccacagcctgctctagaacacagatacctattccttttcagtgcttgagtatatttaaataaagcatgccctaatttatagttaagttttaagtaattcaagaagggctctatacttttctctgagttgatccaaaacaatgactattatataataaacaagaccttgtataccaaaattgtgtttgagggcttatatgtctttttttaatgaataaataaaaggtggaaacggaaggaagggaaggaaaaaagcaagaaaggaaggaaggctaaagaaaagcacaggaagccggggagagcgagaaacagaaatgatgtgactcatggagatctaaaaggcatgggggaatattgccttacatgggctcaaaagaagtctggaaagagattggagaggatagaaagctctgaggccaagtgaaatacagtaatgcagatggagaagattacatctcttcctttacagactggcaaagttcttgagtgaaaaattatacaagatgacctttaaagttgctttgtgaaaaaagttgagcgctgtgtactctgcttcattttttatgtgcctaagtctctgttaaataatcgcagtgctcctttcacgtcattattcctcagtgtgtagatgagaggattgagggtcggggtcacaactgtatagaagagggagatgaacttcccatgagcatgggcataagaactgttggactggatgtagacagctgtgatggtcccacagaagagggacactactatcaaatgggatccacatgtccccaggcctttgcaccaggcctggactgacttgatccttatgaccaccttggctatatgtccataggacagcagtattagcactaagggcaagaggagcaagaccagtgaagcaacaaagagctgaacctcattatcatggatgtccacacatgcaagcttaatcatggagggtacctcacgaagaaatgttggagcaatcggtgtccacagcgaggaagccagagggtgacagtgccctggataagagtgtttcccactccactcagccacgcaacccctgccagagcctggcacagctgagggttcattacggcggtatagtggagaggtttgcaaactgcagcatagcgatcaaaagccattacagccaggaggacacactcagtggagcccaatgccagggagatgtagagctggatgacacaacccaggaatgtgattgttttgtcaggtccttttaggttccacagcagctgggggacaatactggtggtaaaacagatatcaactaaggagaggtgagtaagaaaaaatacatgggtgtcttgagtttagggtctacagagcagatcagaataattactgtatttcccacaagggtaaggagataggatatcaaaacagccacaaagaggatcttttccaggtggggctgatgagagaaacccaccaggatgaagtctcccttgacactgctgttggtcatgcccatcaccctgttcagaactaggagaaacacattacaagaattcagggaggataatgtgttggccattgggcaaaatatcaatctttaaaaagttttgattaatctctaatcaaaacactgactcagagatgttacagtgacccatggaataaattttgatatagaaatcacaaaagaagaccttaaagaaaatacataatacagagagatacatgaaggctattgtggaagcagtattttcctgactgataactattagaagctgagataaagtgtatcacagaaaaaataaaggcagaaagaaagaaaatgtcaaaggaataaagtacattcaattaatttataactcaggacaaattgttcaaattcagtgaaaaaactcagtaatggttaatatatgcaaataattaatataaatagcatttccattcttcaattgtaaattctgagttgggcattttttaaggtttttctttatatgaatggtagctcgcttctggagattatagaggttatttttcctataaaatggcaaacatttggctattgaaagtaataatattaacatttataacttaatgtttaattatatggacacatactttcaatgacttattttctttagggattcgttaactcatttagtccaccagcatactgatgacgtaaactcatgcagtttattcagcaaagatattcttatgcaagcattatgcagcacacctcatgtttagtcatctagtttaccttctggcctataagctggattcatctatgatagtcctgatttgcaaagttctccttctcttctttggtgtgtggtgttagggaagggagttagctctctggtcttgtgtgttgaatgaagaggtagttgaatctgaatggaaagagtggtgatcagggtaagaagggctctttagtgagactaagaggcatcaaaccaacatagaatgtttatcttctagaagatgaaaagatcaaaatttttaatcagctttttaaaagtccaaacacttataaatgcagaagtttaaaatatattcacagatacaaagtatatacccaaatttcacgactttacctcatatataggacaaataggcactttccacgtggcatcaggaaaaattactccagcctaaaattcttcccctacaataactgtatatcctgaaattgcattaatatttgttctgaaaattagtcattaaagtaaaatatataaggtaattttcactgcttttttaatatttatttcacttatcatctaaaaattgtacttagcagtactcaatggaaatgaaaagaagtcacaggaaaagtcagaggaggcatgggtaccccataaaaggatgaagacactgagtgatccctcaaaatagggggaggagagcacaatagtaaaaagagaacatgaaaggacccttaaggaataaaccagtttataaatatgctacatgtaatatattcaatataacgtatactaaatatatatagttctaataatttcactcacagttatacacatacatacccataaaaacatacatacatgcgtaagtcttccgattctctcatttatgttaattcccacccatttagctacactaaattgtactcgttttacttgtatcaaaggaataaaataaagccagacacacatcactcttgttctaatctgtttaatgcagcctgctcattgtcaatttacccatcccaatcaaaggagacttctcctgtatttttaacacacactcacacacaatacctccaaagaaacgcgatgagagatcaattcacagtcatgaaccagctccttatttgtaggaatatgtttgttttaggcttgtagaagaattttattttaccatgatgcaaaatttaacatgtgcactatataatctcccctcacccagatgaacatcactttaaaccagttcgccattaaaagttaagaatcatgggcatggtatagaaataaaatcaaagcataaaaagaaataaatatgttacaagaaaaaaagttttccacatttttttcacactaataatcatattttaatacagaaaggaagcttaagccatagagttcaaaccattattaccttcaagtgacaactcagtgtctaaggctcatgtattggttgtcggggctgttatttgagattggagatcactgaagatcagcaaatcaggagacactggcaaggacgcaggacactgaatccaaaaagatcccagggacacagttctcccaacatgcaattaatatcaggctctgtagtatccaaagatgaaatgtcccaggagattattctgaaagaaataattttgactctctgatctttcaatattgtgtaaatctaggcaaaaccacaaagatatttaacttctgccctcatagcctcccaacgttcaattttctcatttctgctgttaagtttctatcaaaaatctagtattttatatatgcaagtacatataattaatttatcctgttgactcataactttaaattctcttcttaataactttaaattttggggcaccttgcctttacctcacctctactgagacaaaaacggcaggcctgcagccttccaacagggccttttccctcatatctaataggcacttgactgttgctggagataaatatataaatgttttgaacggcgcccttaaacacccctggtctttctcaacttccaatgggctctcttctgtccagaggtcattctgtgtgtatcctgtttgtctcttgcatcaccatagcaaatgttcaacaaattcttaaatcctccaatccagtgtcccacagctctccaagcaggttatcttgccctgacttccaagacaaaacagagggcccagggggaaattccattaacttcctgtctgtcacctataaatgtatatacattcatactcttcctttatgattttttttcaggtctcaatagaggaagtgaacctctatttgtttaaggcaaattctataaatattttagggtccaagaaaaatctaatgcatattcaagtacaagcaggtgatatgaatgactgagtggataaggtataagaaaaacaattgtagaaatgcaatgataagtgtcaacaaacatttagctgaggtctatatgcagtaataaaagagtggtgaacattttgctgcacatgccacatctgaagaaaacaacaactgctgagcgctagttgaccaattttctatgcattgagccccaggattgcaaaatattctgaattctcaatggaatctagatttttatgaaagctttcatttaaaaaaatagtttagttagtgggtgcagcgcaccagcatggcacatgtatacatatgtaactaacctgcacaatgtgcacatgcaccctagaacttaaagtataataaaaaaaagaaaaaaagaaaaaaaaatgtttgctgaaggcaaaaaaaaaaaagtttatataaaatagttcatgaaggtgcaacttaattattacaaagtgaacaaattttgatcaagaaaacaatgtaagaaacattctagaatgactctcaatttcatttccttatgctacttatacctgccccttgtaaccattattatgatttttttgaactatatataaacaaaatcatacagcattatttcttttgtttctgcttatatttattcaatgttatctttgggagattcatttatgtggttgcatataccaatacagcactatatttttactgcattgtatttcattgtataaatatgccacaactattttatcctttgtagtactgataggctagacatttgggtgcttatgatttttgtcttttgtgaatattgctgctgcagtcactttagtatatgtgtttggtaagaaatgtaagcattttggcagggacgatactgtggagaaattgcttaggtttgaggtatgcatatattcagctttggtagataccaccaattctggaagttggttgcacaaacttaaactccacagtatggtgagaattacagttgctccaaatctatactaacagtgttttctgtcctcttaattttagccattctggtgatatatcatgaatatatcattatgattttaatttgtactcacctactaactaatgaagttgaccagtttctcttatatttatagtcattgagaaatcttttgtgtagtatccattcaagtccttgactttttccaaattcatttgtaggaaatttttatatatgccagaggtttaaaaaatagaaggcaagtttcaaatactattttagtcaagtataactttggcaacaaaacaaaattttaaaattgcatgatagtcccatgaattaacatagatttgaaaatattaccaattaattcaattatttaaaatattctacacactgctgaaagtaaatttattccagaaaaaaatgaaattcattttttcattgtgttagcaaaataacacaataaagaaacaacattttataatcatatcatcagataaaaaatcaagtatttgatgagtctcaaaatatataaaaataataaaaatgacttagtaagctatgaaaagaatgatagatcctaatctgttaaacaggatccgaaaaccctttcagcaagcattatgaatatgttgaaaattttctctttgaaattgaggaaaagacaaggacaccttctatttccatttccattcaaactactttgttgtagagactttagccagtataataggataagacaaggaacaagcaagattgcagtagaagaaataaaatttcattattatatatatgattatgtatgtagaaaattcaaagtgattacaactattcatagatgattcaaaattgtatagatattaattatatctttgatctctatattcagtgctaactcaatcaaaattcagactatttgtaaaattttctaagattattctaaaatgtatatagaataccaagttgtatatagaatatcaagtatcattaattctgagacactcttgaagaaaaaattgtcaacaaaaaagagtcaaactccatgaaatatttaaagagttttattctgagccaaatgtgagtaattgacggcctgaggcgcagtctcaagacatcctgagaacaagtgcccaaggtgattgaattacaacttgatttacattttaggagcatgtaaaaaatcagtcaatacatgtggggtctgtgttggttcagtcatgaaaggtggaacaactcaaagtggggccttccacatcaaaggtaaattcaaagattttcttattggcaattggttgaaaaacttgttactatttaaatgcctagaatcaatagaaaggagtgtctggattaaaataagggattgtagagaacaaggttcttattatgtagatgaagtctcataagtggtcacccttacaagcaatagatgggaaatattttgtattcagacctttaaaaggtactggactctcaactaaactcttcaggatcagaaaaagacctggaaagcaaaggcgattcgctacagaatgtaaatttcccccaccagaagcagctttgcagggacatactctcctccctttggaattcaggcataacttaccagcattattaactttaaaacagagatcttaattaagactgacaaaacagattccttatagcaataacataccaaattgcaacctgactctagtatagcatcacatgatagatagccagtcctgaaagaaatcaaagtattttaccccaaaatagatttctttgacaccttttggaatgcctttgaaaagctgttgaagtggcatcgttgtctggggtaaatacccagggttcatcgtcttgcactaagaagattaaggacacggacacatgtgggtgtgttaaggagcagagagtttaacaggcagaagaaaggagagaggcaagcagctctctctctctctctccctcgtgagaaagaagtttttgaaagggaaacaactggcttgcggcagaccacagcagattttataggcaagcttgaggaggagccggtgtctgatttacacagggtcacagattggttctaccaggtgtgacatttacatagcccgcagggaagtctggttgacccaccttaatcttatggccagcaccatcttgtctgctccttattctacacgtggctgacaaagagaagggaagatggagccaccattttgatcatgcttaatcccaggtagcctttttctattagcacaactgccagcattgatcaatgcaaacttcctgtttgcttgtctatgtctgcagctagattctatacaggctgctctttgttagaaaaaatgatttgggggctgctttttattaaaaggaaaaccttacccaggaaggatttccttaccctcactatctgcctaaataatttgtttataacacctatattattgtttcttgtggggaaaatctacattctgtatagaattcgctaccctttccaggtcttttccagatccaggagagatttaactaatagtctgacactttttaagatctcataagagacatttactacttaattttttctgaagcctgccacctgaagactttatttacataacaagaaccttggcttccacaactccccctatcttaaacccaagcatttctgctgacttcgacttttttttttctaataaaaactttattttaggttcaggggtacgtgtgaaggtttgttacagaagggaaactgtgtcacaggggtttgttgtacagattatttcatcacccatgtattatgctcagtatccaatagttatctttttcccctcctaccccttctcccaccttccaccctcaagaaaatctgtttctgttttttccttctttgtgtttatgagttctcataatttagctcccacttataagtgagaacatgtggtatttatttatttgttcctgcattagttagctaaggataatggcctctagctccatccatgctcccacaaaatacatgatcttttttttatagctgtatataccacatttttaaaatctaatttgtcattggtaggcatttaggttgattccatgtcttgcttttctggatagtgctgtgatgaacatttacctgcacatgtgctgtatccttttttttttttttttgagacaggatgtcactctctcgcccaggctgcggcgcagtggcacaatcatggctcactgcagtcttgacctccccagtctcgggtgatcctcccatctcagcttccctggtagctgggaccacaggcatgcaccaccacacccggctaatttttgtatttttggtagaaatgcggtttggccatgttgcccacgctggtctcaaagtgcttggattatagctgagagctgccgcacctggccacatgtgtctttacagtaaaatgatttctattcttctgggtgtatacccagtaatgggattgctgggttgaatggtagttttgcttttagctctttgaggaatagccatactgttttccacattggcttaaccaatttatactcccatcaacagcatataagtgttcccttttctctgcaaccttgccagcatctgttatttttttacgttttaataatagccattctgactggtgtgagatggtatctcattctggatttgatttgcatttctctgatgaccagtgatattgagctttttttttttttcatatgcttactggccacatgtatgtgttctttggaaaagtgtctgttcatgtcctttgcccactttttaatggggttgtttgtttttctctcataaatttgtttaagttcctcatagaagctggatattagctagttatcccagcatgtttgatggaatagggagtcttttcccctttgtttttgtcagttttgttgaagatcaactggtcataggtgtgcattcttatttctgggctctctattctgttccattggtctatgtacctgtttttgtaccagtacaatgctgtttggttaccatagttctgtagtgtagtttaaagttgggtgatgcctctagctttgttctttttgctttggattgcctttgctattcgggctttgtttttgttccatatgaaatttaaaatagattttcctagttctgcaaagaatgttgttggtattttgataggaatatcattgaatatgtaaattgctttgggcagtatggccattttaataatattgattcttcctatccacgagcatgggatgttattccatttgtttgtgtcttctctgatttctttaagcacggatctgatttctttgtaattctcattgtagagatctttcacctacctggttagctgtacccctaagtattctatcctttctgtggcaattgtaattcccaaattagaaaaggattgcctttctaatttggctcttggcttggctgttggtgtatagtaatgctagtgatttttgtatatggatttgtattctgaaactttgctgaagttgtgtatcagctgaaggagcttttatgctgaggcaatggggttttctagatatagtatcatgtggtctgcaaacagatagtttgcctttctttcttcctatttacatgccatttttttctttctcttgcctgattactctggttaggagcaattcctatatatatgtgtgtgtgtgtgtatatacacactttatatatatatactttatatatgtatatactttatatatactttatatatgtatatatactttatatatactttatatatatactttatacatatatattatatattatatattttaagttctgagatacatgtgtagacgtggaggtttgttacataggtatacacgtgccatggtgattgatgcacccatcaacctgtcatctacattaggtatttctcctaatgctatccctcccctggccccccaccccctaaaagaccacagtgtgtgatgctcccctccctgtgtccatatgtttttatttttcaactcccagttatgagtgaggacatgcagtgtttggttttctgttcctgtgttagtttgctgtgaacgatgatttccagcttcatccatgtccctgcaaaggacatgaactcatccttttttttatggctgcataatattccatgggttatatgtgccacattttctttatccagactatcattgatgggcatttgggttggttccaagtctttgctattgtaaacagtgctgcaataaacatacgtgtgcttgtgtctttatattagaatgatttataatcctttgggtatatacccagtaatgggaatgctgggtcaaatggtattgctggttctagatccttgaggaattgctgcactgtcttctacaatggttgaactaattttcactcccaagaacagtataaaagcattcctatttctccatatcctctccagtatctgtagtttcctaactttttaatgatcgccattctaactggcatgaggtggtacctcactgtggttttgatttgcatttctctaatgaccagtgatgatgagctttttttcatgtttgttggccacatatatgtcttctttggagaagtgttgattcatttgcttcacccactttttgatggggttgtttgttttcttcttgtaaatttgtttaagttccttgtagattctggatattggccctttgtcagatggatagattgcaaaaattgtctcccattctgtaggttaccttttcactctgttgttagtttcttttgctgtgcagaagttctttactttaattagatctgatttgtctattttggcttttgttgccattgctttggtgttttagtcatgaagtctttgcccatcctgaatggtattgcctaggttttcttctagggtttttatgtttttaggtcttatatttaagtctttaattcatcttgagttagtttttgtataaggtgtaaagaaggggtccagtttcagctttttgcatatggccagccagttttttcaataccatttattaaatagggaatcctttccccattgcttgttttttgtcaggtttgtcaaagatcagatggtagtagacatgtggcattatttctgaggcctctattttgttccattggtctatatatctgttttggtaccagtaccatgctgttttggttactgtacccttttagtatagtttgaagtcaggtagtgtgatgcctctagctttgttctttttgcttaggattgtcttggcaatacgggatgggctcttttttggttccatatgaaatttaaagtagttttttctaattctgtgaagaaagtcagtggtagcttgatggggatagcattgaatctataaattactttgggcagtatggcctttttcactatattgattctttctatccatgatcatggaatgattttccatttgtttatgtcctctgttatttccttgagaagtggtttgtagttgtccttgaagaggtccttcacatcccttgtaagttgtattcctaggtattttattctctttgtagcaattgtgaatgggagctcattcatgatttggctttctgtttgtctattattggtgtatagaaatgcctgtgatttttgcacattgattatgtatcctaagactttgctgaagttgcttatcagcttaaggagattttgggctgaggtgatggggtttcctaaatatacaatcatgttatctgcaaacagatacaatttgacttcctctcctcctaattgaatatgctttatttctttctcttgcctgattgccctggccagaacttccaatactgtgttgaataggagttgtgagagagggcatccttgtctcgtgctggttttcaaagggaatgcttccagcttttgcccattcggtatgatattagctgtgggtttgtcataaatacctcttactatttttagatatgttccatcaatacctagtttattgagtgtttttagaatcaagggttgttgaattttatcaaaagccttttctgcagctattgaaataatcatggggtttttatcattggttctgtttatgtgatggattatgtttattgatttgtgtatgttgaaccacccttgcatctcagggatgaagctgacttgatcatggtgaataagctttttgatgtactgcttgatttggtttgccagtattttattgaggatttttgcatcaatgttcataatggatattggcctgaaattttcttttttcattgtgtctctgccaggctttggtatcagaatgatgctggcctcataaaatgagttagggaagagtccctctttttctattgtttagaatagtttcagaaggaatgatagcagctcttctttgtgcctctggtacaattcggctgtttatccatctggtcctaggctttttttgttggtaggctattaattactgcctcaatttcagaacttgttattggtctattcaggaactggatttcttcttagtttagtcttgggaggatgtatgtgtccaggaatttatccctttcttctagattttctaatttatttgcatagaggtgtttacagtattctctggtggtaatttgtatttctgtgggatcagtggtaatatctcctttatcattttttattctgtctatttgattcttctctcttttcttctttattagtctggctagtagtttatctattttgttaatcttttcaagaaaccgactcctggattcattgatttttgaaggatttttcatgtctctatctccttcagttctgctctgttcttagttatttcttatcttctgctagcttttgactttgtttactcttgcttctctggttcttttaattgtgatggtagggcgttgattttagatctctcccccttcctcctgtgggcatgtagtgctataaatttccctgtaaacactgctttagctgtgtcccagagattctggtatgttgtgtctttgttctcattggtttcaaagaatctatttatttctgccataattttgttatttacccagtagtcattcaggagcacattgttcagtttccatacagttttacagttttgagtgagtttcttaatcctgagttcgaatttgattaaactgtggtctgagagactgtttgttatgattcccattcttttgcattttctgaggagagttttacttccaattatgtggtcaattttagaataagtgctatgtggtgctgagaataatgtatgttctgttgatttggggtggagagttctatagatgtctattaggtccacttggtccagagctgagttcaagtccttaatattcttgttaatcttctgtctaattgatctgtctaatattaacagtggggtgttaaagtctcccactattattgtatgggagtctaagtctctttgtaggtctctaagaacttgctttatgaatttgggtattcttgtattgggtgcatatatatttaggatagttgcattgatccctttaccattatgtattgcccttctttgtcttctttgatctttgttggtttaaagtctgttttatcagagactgggattgcaacccttgaagtcttttgctttgcatttgcttggtagatgttcctccattcctttactttgagcctatgtgtgtctttgcacatgagatgggtctcctgaatacagcacactgatgggtcttgactctttttccagttggccagtctgtgtctcttaattggggcatttagctcatttacatttaaggttagtattgttatgtgtgaattttatcctgtcattatgatgctaactggttattttgcccattagttaatgcacttttttcataatgtcgatcatctttacaatatggtatgtttttgcagtggctggtaccggcttttcctttccccatttattgcttcctttagaagctcttgtaaggtaggcctgggggtgacaaaatctctcattatttgctgtctgtaaagagttttatttctcctttgcttatgaagcttagtttggctgggtatagaattctgggttgagaattcttttcttttagaatgttgaatattggcccccactttcttctggcttgtagggtttctgcagagagatctgctgttagtctgagaggcttctttttgttggtattctgacctttctctctggctgcccttaatattttttccttcatttcaaccttggtgaatctgacaattacatgtttttgggttgctcttcttgaggagtatctttgtggtgttctctctatctcctgaatttgaatgttggcctgtcttgctaggctggggaaggtctcctggataatatcctgaagagtgttttccaacttggttccattcttctagtcactttcaggtataccaatcaaatgtaggtttggtcttttcacatagtcccatatttcttggatgctttgttcattccttttcattctcttttctctaatcttggcttcatgctttatttcattaatttgatcttccatctcttatatactttcttccacttgattgattcagctattgatacttgtgtattctttacgaagttctcgtggtgtgtttttcagctccatcaggttatttatattcttctctaaattggtattctagttagcaattcctctaaacatttttcaaggtttttagcttccttgcattgggttagaacatgctcctttagctcagaggagtttgttattacccaccttctgaagcctacttctgtcaatttgtcaaattcattctcgatccagttttgttcccttgctggtgaggatttgtgatctttggagtagaagaggtgctctgatttttggtattttcagcctttttgtgctgttttttttttctcatcttcatggatttatatacctttggcttttgatgttggtgaccttcagatgggatcctgagtagacatttttctcttgatgttgatactattcctttctgtttgttagtatttcttctaaccatcaggcctctctgctgcaggtctcctggagtttgctggaggtccactccagaccctgttcacctgggtatcaccagcagaggttgccggacagcacagattgctgcctgttccttcctctggaagctttgtttaggaggggcacctgctggatgccagctggagctctcctgtatgaggtgtctgtcgatccctgctgggaggtgtctttcagtcaggaggcatgggggtcagcgacccacttgaggaggcagtctgttccttagcagagctcgggcactgtgctgggtgatccactgctctcctcagagctggcagtcacgaatgtttaagtctcgaatttgttaattcttaataaaaatgatacacatttctcatgtgctcacatgatcacagctgtactgttaatataatatgtagctgaatgagaaaatagttaattgaaaaagtgattatgatgtgaataatgctttttagtaatttctttgtcaattaaatatttttcagtttttattgttaattaagaaattgatacacaactattgtacatgtttctgaggtgcttgtgatattttgataaatctctatgataacaataatttattgtttatttcaaaatagctagaagaaagacttagcatgttcccgacacaaataaatgctatatttcttttttcccccactaaatattatgtttaatgttttactggttcatgtaaaaatgtatttattttcacttctgacttgaacatgagttgctttcaaagttacgttatctctgttaccataattattattggacacattaatagtttagttttatgattactcttttatcatctgtgtattcagagatcagtttaccctacttttgagataagaataaatggaaaacatgaatcctacaaactggttatgacaatcaatggtagcagtacattttaaagaaatatcactgaccccaaaaatccatcagagactatttcgagcacctctatgcacaaaaactagaaaacctaaaagaaatggctgaattcctagaaacacactacctttcaagattcaaccaagaagacagtaaaaccctgaacagaccaataatgagttctgaaattgaatcagtaatttaaaaacttacaaatcagaaaaagccctgtaccaggcaaattcacagctgaattccactagacatataaagaagtgctggtaccaattctactgaaactattccaaaaaatagaggagaagttactcctccatgttatacatgtccatgtgaagagaccaccaaacaggctttgtgtgagcaataaagcttttaatcacctgggtgcaggcagactgaatccgaaaaaggagtcagcaaagggagatggggtggggcagttttctaggatttgtgtaggtagtggaaaattactgttaaagggggttgttctcttgcaggcaggggcaggggtcacaaggtgctcagtggggagctcctgagattcactgtccaggagaaggagtgtcacaaggtcaatgctcagttagggtgggactggaacaaatcacagtggtggaatgtcatcaattaaggcaggaactggctattttcacttcttttatggttcttcagttgcttcaggccatctggatgtatatgtgcaggtcacaggggatatgatggcttagcttgggctcagaggcctgacattactgtcttcttatattaataagaaaaacaaaacaaaatagtggtgatgtgttgggggcagcaaaaattttggggggggtggtatggagagataatgggcaatgtttctcagggctgcttcaggcaggattaggggtggcatgggaacctagagtgggagagattaaattgaagaaacattttgtggtaaggggtgatatcgtggggttgttggaaggagcatttgttgtatagaatgattggtgatggcctggatgcagttttgtatgaactgagaaactaaatggaagacactaggtctgaataagagaaggagaaaaacaggtattaaagggctaagaatttggaggacccaggacatccaattagagagtgagtgcccaagggggttcagtgtaattatttgcttggttggtgagtttttgggctctatccatgagtttttttaggttgtcgtataccaggccagattgatttaggtaaaaacaatactcttcatttaaaaatatagagtctccctttttcagcagtgagtaagtcaaggcctcatggttttggaggacaaccgcaactgaagagtcaacctgcgcctgaaggactgataaagattgtgatatgtctgcaatgctagcagagaagtcattagagaggctacagaaggttgtggcagaggttgaattgcctgctattccagttccaagagcaatagtggaggcagaaaatattggagtgtgccctgccagcaaagatcatctatccactccaagagggagtcgagagtggcagtttggggatagcaccatgagatatcagctgtgatggtttggaggaaaagtggaaactggcagtgtaaacaagagcagggcatttatgagtaggtgagaatggtgaattggaaaatagcagggatgaaaaagcttgtgagttgcagtccaagaagtgggggcgggtgtgactgcataaaaccctgttgtagagagtaaggcaaggaagaacagacctaataaaaatgaaaggatgtgttaggcttataagggttattactgttctttagaaatgcgaatgagttttaagggaagtaggggagagtactcgcaacttccaggaggaagaggagagatctggctggctgtccaatggacacagctttattctgtaatggtgaactcaatggggagattcctgtagatggacggaagttggggtgctatagatgactaggtagggtccgttccatcgaggctgtagagtttcaggggtcagactcttaacaagaaccgatcatccagctagggtgtcttcatatggctgggaatctggagtaggcaagagaagattagcagcctggcgaatttcctgtctagcctgctggaggactggaagatagttgcccagagggctggtgtctggaataagattggggctgagcaagaaagtgtgtctatataaaagttcaaatggactgtaccctgtagcatctcgagggcaggctctaattctgagaaaggcaagtggtagaagtactgtccagtcctttttaagttagaggctgagcttggtgaggtgtgttttttaaagagcattagtccattttacctttcctgaagattgaggacagtaaggggtatgaagtttccactgaataccaagaacctgagagacagcttgggtgatttgactaataaaagctggaccattgtcagattgaatagaagtagggaggccaaatcagggaattatatctgttagaagggaagaaatgactgcaataggctttttggaactagtgggaaagtcctcgagccatccggtgaaggtgtcgatccaaaccaggagatacttaaatttacggacatggggcatatgagtaaagtctaactgccaatcatgagttgaagtaaatccacaagcctgatgctcaggaaaaggaggaggcctgagaaagccttgggggctggtggcatggcagacagaggattgagaggttatggtcttaaggatggacttccatgaagagaaggagatgaggagctgcaggaatcaagccacaggcttgtatcccacatggaagtggtcatgaagggaagaaagaatggactgagcttgtgaggcaggaagaatgaattttccatgatttataagaaccacttgccttgagttggaaaagactggtagagcaggttttcagaaaagtaggtgggagtgttggaggagaaggagaaatactggacctctggagtgagggctggaatattagtggatgtggaggcatcagctatttcttttgccgtcctgttggcataggcatttccttttgcaataagatcagtaggtttctggtgccctttataatgaatgactccagccttggctggcaggaaagcaaccttaaggagggcctttgttagggaggcattgataatggaagagccttgtgtggtaaggaagcctctttcagcccagaaggcagcatggttatggaggatatagaaagcatatctggagtcagtataaatgtcaatgtgcattcctttagtgagagaatgcggtagttaaagcaatcagttcagcttattcggaagtggtggagggaagtgcagcagcttcaatagtagcggtgtgggacacgacaacatatctagctttagctggtgaaaattgattgggtttagaagaactgccatcaataaaccaagtgtggtctgtgtttggaattggcagaataggaatatgaggacgggggaggatgctatgtttattagggaaatacagtcaggtggttcaggacttgtgctgggtgctaagtgagaaagtgggttgaaatcaggcctatggataatagttactgttggagttttaacaaagagtgaatagagctggaggagttgaggggcagacaataaatgtgaaaggtatggggaggatattaatgcttgaaggttgtgagaactgtaaagggtaagtggagcatagcctgtgattttgaaggcctctagaagtattaaagcagtgcctgccgccccatgcagagccagcccagaactgtgaggtcaagtttctttgatagaaaggcaacaggttgtgagcctggctcctgtgtgaggactccggcagcacagacttgtatttccgctgtgtgtaaggaaaagggatgggacgagttggggagtgcaagtgtaggagctgtctccaggacctttttgagaaagtgaaaggaagaatggggaaaagacttaggatctatgggattagttaagttatcctttgtgagcttgtaaagtggttttggttagaatagcaaagcctggtatccagagttggaaatatccaacaatgcctaagaaggaaaggagttgtttggtggtggggattggggtctgggagattaactgaatacggtctgcaggaagggcacatgtatgttgatggaggattatactgagataggtaacactaggagaagaaatttgtgccttggagggggatacttggtacccctttcagtagagatgttgaagaagcaggatagtgtcctgctgggaagattagtaagaggggctgcaaaggagatcatcaaaatattgaataaggtgagaggcagatggggaagaagaaagcagatcatgagaaggggcctggccaaagtagtgtgggctgtccctgaagccttggggcagaacagtccaggtgagttgttgggattagtgggtgtcagggtcagtccaagtaaaggcaaaaagaggctgggaggagggatgcaaggggatagtaaagaaagcatctttgaggtcgataacagaatagtgagttgtggaaagggttattgaagataggagggtgtacaggtttggcactataggatggatgggaaggacaatttgattaacaaggtgaagatcctgaaccaacctgtaagacttgtccagtttctggaggggtaggataggggagttgtaaggagaatttgtaggctttaagaggccatgttgtaacaggtgagttataacaggctttaacccttttaaagcctgctgtgggatgggatattggcgttgagcagggtaagggtgattaggttttaatgggatgataaggggtgcatgatcggttgccaaagtaggagtagaggtatcccatacgtgtggattaaggtagggagacataaggggaggatgtgaaggagactttgaactggggaaaagggtggcaatgaggtgtggctgtagcccaggaatagtcagagaagcagatagtttagttaaaatgtcttgacctaataagggagctgggcaggtggggataactaaaaaggagtgtataaaagaatgttgtccaagttggcaccagagtgggggagttttaagaggtttagaagcctgaccatcaatacccacaacagttatggaggcaagggaaacaggcctttgtaaagaaggtaatgtggagtgggtagcctccgtatcaattaagaagggacttacctccactgtaagttacctgaagtgtctgtgatggtccaggaggcttctgaggcaatcaggcagcatcagtcttcagccactaagccaagaagatctgggaaggagtcagtcagagagccttggggcagagttccaggggctctgggagtggcttttgggcaagctggacagtccgatttcgagtggggacctgcacagataggacacggcttaggaggaatcctgggctgcgggcattccttggcccagtggccagatttccggcacttgaagcaagatcctgggggaggaggtcctggaggaatgcctggccactgtggtttaggcgttttgaagttcttgtgtgctggagatgtggctggggtttctctcagagcggaggcaagtaattgcaatccagaaatacattgccgcttggctgcctcttctctattattgtacaccttgaaggcaaggttaattaagtcctgttgtggggtttgagggcggaatctaatttttggagctttttctaatgttgggagtggattgggtaataaaatacatattgagaataagatggccttctggtccctctgggtctagggcggtaaagcatctaagggttgttgccaaaccagccacggactgggctgggtttttatatttgatgaaaaagagcctaaacgctaaccaatttgggagaggtcagataaagaaaaaaggagcattaatcttgactatgccttcagctccggccacctctctaaaatgaaattgttgggcaggtcggggagagctacttacagaaagaaactgtaagccagactgggtgtgaagaggtgaggtgatagaagcattatagggtgggagagtggaggttgaggaagaattgggacctggcttggcctggtgaggagcagcctggggaggaggggcaaggtcagatggatctgtagaaaaagaggattcaaaggactcagagcttggggtggagactgaaggaacacataggagagaaagaagaaatatttggcacgagttgcaatgggagcagagactagggagggaccgatgtgtaaagaatgcctggacatcaggcacctcagaccatttgcccattttacaacaaaaattatctagatcttgtaggatagacaaatcaaaagtgccattctctggccacttgaaactattgttgagtgtgtattggggccaagtggtattacagaagaaaataagatgtttaggttttaggtcaggtgttagtcgaaggggttttaggtttttaagaacacaggctaagggagaagaaaggggaatggagggcagaaggttgcccatagtgaaggaggtgagtttaaagagaaaagtagagacacagagaaggtgggggtgagtagccgtgggctgtaatgtgggtgagcagccaaagcaggtgtccccacaactgacttgtcaccaagggaatgtgggtgaatgaccaaggcaggcatcctcacggtgatcagacaccagtggaatgtgggtgaatgattgaatgatcaaggctggcgtcccagcagtgatcagacaccaatggaatgtgggtgaatgatcaaggcaggcatccctgtggtgatcagacaccaatggaatgtagatgaatgatcaaggcaggcatccccgctatgatcagacaccgagggaagaccatcttcccatatccgtgaccgacgtcggagtttttgagttcacggataaaatgtgtctcctttgtttccactagagaggaaaaagaactggaattggaagaacagggagattgaagggtagcgagagaagctggagaagagtgaagagactgcttacctgatttgaaattggtgagatgttccttgggctggtctgaggacctgaggttgtaggtggatttcctcacggagtgagggtgaggacagggggctggtctcctggagcagtccccctgtcccaggtcttcggcaccaaatgttatgtgtgtccacgtgaagagaccaccagacaggctttgtgtgagcaataaagcttcttaatcacctgggcataggcagaatgagtccaaaacagaagtcagcaaagggagataggggtggggcagttttataggatttgggtaggtagtggaaaattatagttaaagggggttgttctcttgcatgcaggtgcagcagtcgcaaggtgctcaatggggagctcctgagattcattgtccgggaaaaggaatgtcacagggtcaattgatcagttagggtggggcaggaacaaatcacaatggtggaatgtcataagttaaggcagcaactggctattttcacttcttttgtagttcttcagttgcttcaggccatctggatgtatatgtgcaggtcacaggggatatgatggcttagcttggtctcagaggccttacactccctaactcatcttatgaggccagcatcactctgataccaaagcctagcagaggcacaacaaaaaaaaaattttaggccaatatgcttgatgaacatgggtgcaaaaatcctcagcaaaatactagcaaactggatccagcagcatatcaaaaacttaatccaccacaatcaagtaggctttatttctgggatgcgaggttggttcatcacccacacatcaataaatgtgattcactacataaacagaactaaaagcaaaaaccatgtgataatctcaacagacagaaatggcttttgatgaaattcaacatcccttcatgttaaaaaccctcaacacaccagacattgaagaaacattcctcaaaatattgagagctatgtatgacaaacctgcagccaacatcatactacatgggcaagagctggaattattccccttgagaaccagaacaagacaaggatgtcccctctcattactcctattccaaatagtactggaagtcctagccagagcaatcaggcaagagaaataaatcaggcaagagaaagaaataaaagtcatccaaataggaagagggaaagtcaaacgatctctcttcagagatgatatgattatatacctagaaaactccactctctgccaaaaggctcctagatctgataaacgatttcagaaaagtttcagaatacacaatgaatgtgcaactattagtagcatttatatacaccaataacatccaagctgaaagccaaataaaaatgcaatccatttaccatagccacagaaagaatgaaatacctaggaatacagctaaccagggaagtgaaagatctctgcaatgagaattaaaaaacactgctgaaaaccagagataacataaacatatggaacagcttttcatgctcatggataggaagaatcagtattgttaaatgggcatactgcccaaagcaatttacagattcaatggtactactagtgtgaaaggaaaatgtcttgagccccccaaatcactaaggaaaactcaagctggaaaccgcttagggcaaacctgcctcccattctattcaaagtcaaccctctgctcagtgagagagaatcatatctaattacctcctttggaaaggctaatcagaaactcaaaagaatgtaatcgtttgtgtatcacctagtgtaacctgggagctccctctctgctttgagtcttctttcctttgcttcaagttgtcccacctttccagaccaaaccactgtacttcttacatatatagattgatgtctcatgtctccctaaaatgtgtaaaaccaagctgtgccctgaccaccttgggcacatgtcatcaggacttcctgaggctgtcacaagtgcttcctcaaccttggcaaaataaactttctaaattaatggagacctgtctcagactttctgggttcacactagcaatctaccaataacatttttcacagaattagaaaaaaaatgattctaaaatttatatcaaacagcaacaacaaaaaagcctgaatagtcaaagcaaccctaagcaaaaacaaacaaacaaaaaacacaaaaccaaacacacacacacacacacacacacacacacaaaacaaagctggaggcatcacattacctgacttcaagctatactgcaaggctaccataattaaaacaacatggtactggtacaaaaacagactcatagatcaatggaatcagttagagaacccaggaataaagcctcacacttacagtaatctgatctttgacaaagccaacaataataagcaatggggaatgactctgtattcagtaaatggcgctgaaaaaactggacggccataatcagaatatcgaagctggacaactacttttcactatatacaaaaatcaactcaagatgggttaaagactaaactgtagaacctaaaagtgtaaaaatcctagaagaaaacctaggaaatgccattctgtacatcggccctgacaaatactttataatgaagactccaaaagcaattgcaacaaaacaaaaattcacaagtatgacctaattaaactaaagagcttctgcacagcaaaagaaactatcaacaggatatgcagacaacctataggatgggacaaaatatttgcaaagtatatctgacaaaagtctaatatccagaatctataaagaacttaaatcaacaagcaaagaaaagggaatgcttatacactactggtgggaatgtaaattagttcagccactgtgaaaagcagtcggagatttctcaaaaaacttaaaacataactactatttgactcagcaatcccattacttatatatccaaaggaatataaatcatttagccataaagacatatgcatgtatatgttaactgtagcactattcacaatagcaaagacatggaatcaacttagattgccatcaatggtggactggatttaaaaaatgtggttggctgggtgtggtggctcacgcctgtaatcccagcactttgggaggccgaggcgggcagatcaggaggtcaagagatcgagaccatcctgggcaacataatgaaacccaactactaaaaattaaaaaattagctgggagtggtggtgcgcacctgtagtcccagctactttggaggcggaggcaggagaatcacttgaacctgggaggcagaggttgcagtgagccaagattgcgccactgcactccagcctggtgacagagtgagacttcgtctcagaaaaaaaaataaatgtggttcatttttgagggatagttttcctggatataagactcttggttcaacgttcttttagaactttggctgtcatccccactgccttctagtctccagtatttctgatgagaagtcagatgataatcttactgaggttctcttgtacatgatgagtcattttcctcttgctgctttcaaaactgtctctttgactctagcttttagtgttcctattatgatgcaactgaatgtgaatatttttacattaatcctatttagagaaaggagctttttagatatataatttttttcatcaactttaatgtttcagcaattaattctttgaatatttttttaacttgcttctctctgctcctttgatacttccattatgtgtactttggtgtcatcagtggtattccatacttgtctgaggatctgttcattttatttttttcttgttgctcagattgcataatctctatcagcctatcttcaagttcactgattctttcttccatcagttcaaatctactgttgagctcctctagtgaagttttcactgtgcttttcaactctaaagtttccatttgtttcatttttaaaatactttatctccctttttagtagtctctatttgatgagacactcttatcataccttcttttacttctttaagcatgattttatttccttgaacatatttatattggttgttttgatctatgataaatctgacatttggggcctctcactggcagtttctattgtctgctcgtttacttgtgtatcagtcatgctttcctatttttttacaagtctcatagtttttttgttgaaaactagacatttgagtaatataatgttactaaattaaaactagacattgtagtaactttgtatactgactccccgtcctgggtcttgttttattttttgtttgttagtgacttggccaggctattttagtaaatttcctccacagtgtgaagcctctggtgttacccttcagagagcacagccttgggcatggacataaacaacctgggatgagaatagtttgagcagggctttggatgtcttgtctttgcaatgtcatttgctgatttttgttaaccagtcttcgtcatttggtattatactcagctgggaggatccattaattgctggctgggtgctctattggttttgataatgccctggggacataaattgctccacagtgtgatctaattttgcaggggtagttcttgaggtcactttttgagatttgttctgaccccagaaaagctctttccctggttgtcactggtaaactcactgttttatggcctagcttgttgtctcatagagtctcagccttgtcttaactccttagcaccaaatattcattgttttttaatgtacccttaggcttgaactttcaacactctgcttcaaatacagtcagtttctttggacagagcttttgaatgttctgttcttcccctgtccctagacaaaaccttctatgccactgttccaagggcagtgcactgaagagtggtagcttttacttttctttgcttgcctctcccagtgttggacctctgtttatgagtgagctagggcaaaggtgataagagttccagtattcttggctcaacatgcttggcatagggtatccaccttatgtatggagtgcaggaaggtagccccagtcttttgtttagatctctgggaatgtagccttgacaactcagaagtgaaagtgataagaaatgctggcattctgcccctctcagtgagatactatattccttgactgggagctgaggggaaaggaatccttttcttcttggccacacctgtccagagtggagcttccatcacactgagctgggtaggaaagcaggctgtggctcaagtgccatagactcttgctcttcttagtgagatttagtagagtatcttgaataagtattacttcatttgttgttttctcttaagacaattttcagagacttggaattaaaaaaattgtatcagtcatggttgttttacagggcaatgagccacaccaccattatggaagtgccattataatttatgaacatttctttaaaaatcataactgattaaaagtatttataaatcaaaatatgaacatgttattatttttcagatattatcaaaacaaaatttgagaaaaaggatatatcataaattttaatagaaaattcaatgatggataaaccacgtggttcgataggacccaaacgaaaccattaatatacatagcagaaaaatactgcttttcttaataaaaatagcttttgactttttatttccccaaaattaaaaatgtttctacaaaaaatgggcaaatatcctaaaagacattttggaaaaaaagaaataaacacatatgaaaataatttcaatcctattctaattagtaagttgaaattgaaaagttgaggcattttttcgtcctgaaatggcttatatttaagtgactgttaggaaccaaccatgttgcaaatgtttagaaaatgatcagtttcataatctatgtggagaaggataaattctttttgtaagacaatttgctgttatctttcacaataaaaatgtacataaaaatattttgaactaactttgattaatttcatttctaggagtttattctgcatgcatcctaaaatatttgtgaaacattactttcatgtaaaaaattggaaacagcacacatgatcatcaagaacgagctagttaactgaatattatatacatttaacataattacacaagtttgcatatactcatatagaaacagggtcaaattatattcgtaattaaaagtggtagagcattgaatatatcgtatttcatttgaatgatataatgcagcataatttgtcttactgcgacattattggtttttggagggtgatgtgcctcatgttagaagagttacatatttaattttcactttatactctaataaatatattctttatatatgtaacaaaatttgaattattcaaaataacttaaaatttgaaaataattaagcaatttattttgattctgttacttaggtttgacaaacaacatagtaaaggacatatctttttatataattcccaaagcattaatgtgattaaaggatgtgtgttttatcatatacagtgtctaccattgtctgaggtgctttgattctacaacttaaaactttccagctgctgcagtttctgactgcacaatattatactcacaaaattaaaatcattaccaaatgattttcttacaatatgtcaaacaatttagtgagttaaaaatagatgtgatttaaaaaagtaaaataaaaaaagattcttgaaaaatatgcattttggtttagatccttgtcttagtcaaattaaaaaagaaaacaaaacctattagagtctactagatcaatgcactctttgtggcttaaatttgtttgtgtaagttctactactagctatttactgctaaactcactttctcactaatggtttgctcataaattttttcttctaacaaaaaacgtatcagttcaaataaaaagatgagaagttttcttttctcagatgtttggttattcttcttgaaagcagacaattcactataaattactttcaagggctttggtttcctatatttttactgcatttctcctcaacttccaagttaaaactaagatacaacttgacatttatttttctgaagcatcatgtgcattacggcttttatattctaaaggtgtgagaaaggaaaaatggaacacacattgggaatgttgacgctggattgtgcttttatctgtagttattcatgtttcaggcagttcattcctactttctgagaaattgatgagttgttgtgtttgtccttgctatctgtctttctggataatgggaaaattctcaaggattctgaataagagactcatatttgatgtttaaagtcaaaggaggagcaagggagattttcacataagcagttatttaccagagggaagggcagggcccaagggatctcattatgaagtgaatggaattactggcattgatgatctcactttgttcctatcccaaaagattctgttactttagattttaacttctcccaatgctatgtgaagcaattaaaacgtttcagataaatttcatagtagttcgtacagcaaaattacttttagagttttttctcttcaaggaaatacacaataaaataattaactgttcagaatgaaagtgaactagctaaaactcaacccaatgtctttcattttcagacactaggaatttgtcaaagcaaccagatcaccagggactagcaacaatatctaataacccccttcttcagggatgattagctagttaagtgcctggaatgtctctgtagacaagacttgagggaaaaagctttaatattatgttgcttcattgccagatctattcataaagggattattctacctctcagatgagaaaatctgaatctgcaaactggcttaatatggaaactgggtaaaaagccatgaatccctattatattgtttcaagttatgtttctgtctccacacctagaattttttctgctaatatactccagctaacatcttagtaggtatcttagtccatttgggttgctataacaaaataccataaactgggtagctaataaacaaaaaaaatttacttatcatagttctagaagttaggaagtctgacattaaggttctggcagattggtgtctggtgaaggcccctttatggttcacagatggtgtcttctcactgtgtcttcacatggtggaagagacaaagcagctctctgaggcctcttctataaaggcatgaattccattcaagaaggctgtgccctcatgatttaatcacctcccaagggcctacctgctaacaccatcacactggtgattaggttttaacatgttttgggggacacagacattcacaatacagtggtaggttaccaaatattgtgtttttaagtaccgtttgataaactgtgtatcactacaggtccctgtaggtcacaataccctagtcaatgtgacttacttgtagtaactacttccactttgtctatgatggtgtcacttcctggcatttaattttccagaattatcatttttctcaagaccatataatccaatttcagtttcattccccaccatcagctctgcaccaaagaattcagatgccacagagcattttaagaccactgatgccctcctcactgatccatttcttaatgctatagggaagaaaatgtcttccaatcttatagcacagggtcttatgtacagagggcagatggccatactgtattagattacaaaatctctattgactactgattccttattttacaaggtactgtggaaattctagcttttcaacctcattagctataggctatctctgagttcaagcttcagtgagctaatgtgaaagaagatcaataacactttcaggagtttgagccaatgcttgtatcctgtgctctgggtgatagcactcatgtcattaaattcagttcattcaagctctgtatttcatattccttgacatccacccccaaacatactcttaaagttctcatctatatcgtaagaaactgcatatctttttttgttaatagaccatgttattatggagcagtatttgtgtttaaccgtatctctttgttgttataattttccctgatgattggtgaagttgggcacattttcatgtgttggccatatggctatcctcttttgtgaagtgattgttctatcacgttgtttgtgttttttcttactgatttgtagaaattctttttatattctgaatagttcttacacacacacacacattgcctctcttaatggacctcctttatatatttgatttgttaatatttagggatgtttgcaactgtgtttatgaaagatactgataaacattttttatttttttgtaaatccttgtaatgtttttaagtctagcttatgctggccttataaaaagaattaatgaatacaaaatgtttacttactaccaacttatataaaaaagattagtgaagttgttgaatgaacacaaaaatttaaaactaagaatgatttattaacattgtaaccatatcaacatccatatccaatctagtcctacattttattttagtagcaaaattttgagaaagtccagattcctgcagcaaatagctacaaatagaagtatattttagaccagtaacctaatatgtcttaaaataggtagagatggcaggagtatttggaatctaaacaaaaatgttttaatcttaataggaacagatgaatggtgaattatagccaaaactcatagttaacacatgaattaatgaatttttgttatagtataatagtttaattatatttaaaattattaaataatataaattataatctgaatttaatctttataaaatgctcccccgtaccccagttgacataacccttagactttacggaacctgttttgttgccacaactgtagatgaatcatccaagataataagtagtgtttttgaaagacatttttaattttttaaagaatgaacccttgacaatgagggacattgatactaaaatacaagcaaaatttttaggtattttctttttcagatgatgactactactaaaataagttgactataatttaaaggttagacaaagataatttctttattgggaatttctttttttatttttattttttgtttgtttttgattcggagtctcgctctgtcgcctaggctggagtgcagtgtagcgatcgcggctcactgcaagctccgcctcccgggttcacgccattctcctgcctcagcctccagagtagctgggacttcaggtgcgaattttttgtatttttagtagagatggggtttcaccatgttagccaggagggtctcgatctcctgaccttgtgatccccctgcctcggcctcccacagtgctgggattacaggcgttagccaccgtgcccggccaggaatttcttgtaaaaagatgttagtgacctattgtgtctccagaacctttttcttttccaataagccttttcatggcccacttgaactccttattccttagtgggatgggttcaaggtgggagtaacaatggagtaaaatatatggagaagtttgccctcatcctgagatggactgtttcctggctctatatacatatatctaacagtcccatagaagatggataccacaatgagatgggagaaacaggtcccaaatgctttttgtcttcctgctgcagacttgatcttgagtacagccacagcaatgaagccatatgacacaagaatgagaagaagtgatgcaaggaaaatgaaaacaacaacaacaacacaatgcaaataaggtttctgacagagcaggagcatcaccatcttggacaagccccttattctatagttcattttaataaaaaaccacctaatccaaagggcctcagcctaatggctaaggtcagcacgaccataaaccacaaataacatcccaaccagaaaccttccaaactcctccccgaccagagtcatgctagcctctagataagccctctcaagctgggaagatgctagcccagagataacccccctccaggccagaaagatgtctgccccaagataacctcccctcttcccagagagattccaaccccgccataaacttctccacacacataaacattccaagcttgtaataagccccctcaccctaaaaccaatatatgttcttagccccctcaccctaaaaccaatatatgaaatcagccaggagtgctgtcaggttttaattaaggaaaacctgtctttaactgccagccacgtttcgtgtttctttcttctttctttaactcttacagtttcctccatgactgtggtagccccacatgcaattttgaccattgcagatatttcacaaaaatagtgatccaggtggtggtctccgcatcgaggaagactcacaggacagggggaaagtatcatgcaattagtgacaccaattaaccaggtcatggccaccaggccttgacagagttgggggttcattatggtcatatagtccagaggcttgcagacagcattgaatgggtcatatgacatcacagccagaagcatacattcaaccgtgcatagcgtcacattagtgaaaagttgaaaagcacagccaccaaaagtgattttcttgtctttaccccaggcattgaccaacatctgtgggactatatttgtggtgtaacaaagatccaagatagccagatttctaagaaagaaatatatgggggtttggagatgtttatccagtaatggcagcaggataaggaccatatttcccatcaaagaaattgcatagaagaaaaagacaaccccagagatgatcatctccagctgaggcttcccagggaacccaaggagcataagccaaccaaagtaactatcattgatcatttttgctattttctgaatatcagctgtgaaaatttaaaaaatagtcaacattttggaagccataatgaatatatttagatataatattagcagtatatatagctaggaaaagtacataatgggattgaaagaaaatataagtattttatatttcaccattgttctaatgttttatctgtttatccaactaagtgtaaaatttatacccagggcaatttgccttacaaggtctatattctcaattacattgtatatttctataccaaggcaaaaaaaaaaaaatctacaaaaatctcaaaggtgaatcatgagcaaaatggctaaataaaactggatggatctccccttattaaaaaggatattacgaaggggttagaaatctgttacaagttatcacctcctttagccaagggttcatagagaatgcaggttttataccttttatgccttttttctaatatttaagctgaacagttttaatcctgctgtccaccttcactctgctatgtaaatcttctgaccttaaatttttaaaattcaaacttttttctttcatctcaaaacttgtatttccaaatattatttgcctttcctttccaactcccttgagacagccaggtgggaggtgttccctggagaaactccaaccagcctgcccactgaggtggagcctccagaagttcatgatgtttgccacaggaaggagcctggctcctccttttcctgtgtggaacctgggattcaaacacctggtcgggaagcactgtagcagggactctggccttccaagagcccgtgtttccccctttacacccaataaaatcctgtcttactcaccatttaagttgtgagtctgaattttcatggccatgggacaaagaaccccctttttagctgaactaaggaaaagtcctgcaatattttttggcacacaatgtgagggtttgagaagcaatgagtgaggtgcaaactcacagttccacatggctggggaggcctcacaatcatggcagaaggtgaaggaggagcaaagtcacatcttacatggcatcaggcaagaagagtgtgcagggaaaattccctttataaaaccatcagatcttgtgagacttatttactatcacgacaacagcatgggaaagacccattcccatgattcagttacctctcactgggtccctcccatgctcccatgcaggaattatgggagctacaactgaagatgagatttgggtggggacacagccaaaccacatcaaacactgaaatagaaaaaaaaagacttgaaacaaacccacagatctgtggaaatttatttatgacaaagacaacactacagaagaatagagaaaaattataattttcaatatatggtgctggaccaatgggatattaattaaaaaaataaatttgtcccaacttatactgtgtataaacatctattccagatagattgtagatttagatgtgaaagggaaaaagtatcttctagaatagggtacggaaacttttttggaaaggccagatagtaaatattttaggcattgtgtgtcatcaggtctcggtcacaactactcaactctgtagttgtagtgctaaagcagccatagacaaaagtaagtaactgggtgtggctgtgttcctataaaactttataaaacagacacaagtggcccactggctacagtttcccaactcctgttttagaaatcaatatgaaataataactttatggtattattaggtattattaggaagaggaattatttctgtaactggtcttaaaaatcactgacaggtaaaaaatgatgaatacacttcaatcattgaaactacaaaattctgttcatcaggtgacaccattaggagtcaaaagacaaatcacagaaaaggaagagatatttttagtgcttgtgcttgttaaaaggcatatccagaacatataaatacttcatatcaataagaaaaatagtaaaaaattgcaaaaacctgaatagataaatctcaaagggtaaacataagtggccaatgcatttgtgaaatggatggtgctcgtttgcttcaataatcataaaagcaaaaattatacccatcatgcactcacatcagattgactaaaattaaaaagaaacctaagaaaaccaaatattgatgaagatgtagagcaatggaaacacatacactgataagtgtttaatatggtgcaaccactctggaaaattttggcagtgtttcaaaaaacctgagtacaaatatacaatgaggatatatatacatatgcaagatgagccaaaatacatgcataaaatattctaagcagaattgtttctgaggtttgaaaacgtgaaaaactataatttttatgaagacagaataaataaataagttgtatatgtatattatgaagtatttacagctgtggaaataagtgaagtacagaaatgcttaatgcatagatgaatcttaaaaatataatgttatttgaaagaattcaagtacaacagaatccatgtatataaaaattaaaaaaattaaaccatattatttggagatgcatagttaggtaagacatctgtaaaggaaaggaaaagtgtgaaatctatatatgtaagaataataattaatgttgagagagaaggatagggattataaccatgaagcggcactttggccacctctgagtacatttttctaaaacttgacttgggtgggcttttgggtgttccatcacagtgtattgtacaataattctttaaggtgtacatttatgttcttttgatctgaaaatttctcctgtctgcttttggtaacttccttttctctgttttctctctcttctattttttgaaagatgttggaattcctggaaaatgtggcgttcttaatagtcataaaagtactaaatatatactgcaaaatgctaggtgtgtctctgagatttaggacaacttctgaaagtactgtcattaacggagaagctggaataaaaagaaaagtcactccagagcttaagtagttcctacaagtatctcaatttatgatgcttcaaaacagctattgaaacaattttactttaacttatctaatggagtatttagacttcaaaatcctattaagttcatttttcatcctcaagaactacaaaaatatcaaaatcaaatattctagatttttcattttatttaagttttctactttctcaagggagaaagagggtataaggaataaaattaatcactctagcttttttaataaaaagtctttttggcatgaatggaattatgtgactgtataaataactaggacatgagcaagagatggagcaagaaaaagtgatattggatattggatcagaaacataaaggaagttttcaaaaattctttttcaagttacaagttggtaacatagctctgaactatcccatgaatcaacatttatcttcaagacaaaaatcaaatttatcttcagtcaaaatatggaaaggataataactcaacaaaaatgagaaagaaatgcatttaaaaacacacttcagaaaaagacagaaagaccatttcaatagccaaataaatcacctttctatgtgtcagttttcttgaagcactcagagaaaaaatgtagaacatctaaaaccaggtgacatggcaatacctccatgctcatccccaaaataagtagtaaaaacttggaaggccaagtgggaaagaaaaaagcattatcttaaagatgattattggaactgataaaaatatttttcttttgtgatcacaaaaattgagctccttgagtaattatctaagcagagaaagatagggggaaattactgtggttaattaacatgagatcttttcaaagatgattgataactagaactcttggtcttcttggttaacgactagctttgctgctgtcatcttcaggctggagatttgcctgtgtaaaaatattcctgggactggttggagcaaaagtgttgtaccttaaaatagagggcaatgaaaacagcttttaatctccttaaattaatgacaatatttagttaacataatcaaaggagactattagagttaaattggtcaatatcaatataattgtaacatatataatccaaaagaaatcagtgcatagcatgttatttttagtgttggcactttagtttataatttcattttaaatatgagttttgtacatataccaatcatcatggattaagtattcaataaatacattcggcttaattataatttttattataattttattatatttttaatggatattatctttatctcaggtgtagacaatttatttacaaaataaattgtctacattttagattgggaagatcaattgccatattagaaattgctgggaggaagaatcaatgtcctcttttttccatgcaatctttttcttttccagttagcctcttcatggcccccttgaactccttattccttaccgtataaattaatgggttcaagctgggagtaacaatggagtaaaatatactgagaagtttgccctcattctgatttggactgtttcctggctgtatatacatgtatgtaactgtcccacagaagatggataccacaacgagatgggaggaacaggtcccaaatgctttttgtcttcctgctgcagacttgatcttgagtacagccacagcaatgaaaccatatgacacaagaataagaagaagaggaacaagaactataatcaggcacatggcaaatgtggttacctccatggctgtggtgtccacacatgcaatcttgaatcttgatcattgcagacatttcacacacacaaaaaagtggtctaggtggtggttcctacatcgaggaagactcgtggcataaggggaaggtatgatgcaattaatcacaccaactacccaggagatgaccacaaggccctggcagagttggaggttcattatggtcatatgatgcagaggcttgcagatagcattgagtcgatcatatgacatcatggacagaaggatgcattcaactgagtacagtgccacatcaatgaaaagttgaaaggcacacccaccaaaggtaattcttttgtctttgccccagatactgaccaacatttgtgggactatatttgtggtataacagagatccaagatggccaaatttctaaggaagaagtacatggggacttggagatggtcatctaggaaagacaataggatgatggccatatttcccatgaaggcaatagtgtagaagaaaaagacaaccccagagatcatcatctgaagctgaggctgccctgtgaatccaaggagtataaaaccactgaagtggctatcattgatcattctgttttttcttaagggaaatccatgtcatcattttggtaaagggcaacggtgtgattttcttatttattttgcattgggtttggtgaacttctcggatttatggtggtgtcattaattttggaaaattctcaaccattatctcttaagatttttttctgtttatttctttttcttatattctggagctccaagtactcatgtgtcagaggagataatattatcctacataacttggatgctttttcttttttctctttgggttgaagtttggataatttcaattgacttgtatttcagttcatgaattctttcctctactgagtccagcctattgttaagcccaccaaattaattatttatttcttatattatttctggtatgtttttttttatatccaacatttccatttggttcttctgtacaatgctaatctctttgttgagatctcccctttgttcataaatcttgtctgcctttaccagcgaaatgttaaaacatatttaaaaaattcttatctgatgattctaatgtctgaaccatgtctggatatacttcacttgaatatttcctctttttagcttcaaatgactcctgtttctttctttttcttttttctttttctttcttttttttttttttttttttttttttgagacggagtcttactctgttacccaggctggagtgcctgggtgatctctgctcactgcaacctctgcctcccaggttcaagtgattctcctgccccagcctcgctagtagctggaattacaggcgtgcactgtttctatttttcttgcttgttagtgtgcctcatagtgtttaatttttattttatgccaggcattgtgtgtcttggtcagcttgggctgctctaacaaaataccacaggctgggtggaataaacaacagacacttatttctcaaagttctggaggctgggaggtttaagataaaggagtaggaggtgcagttcctgatgaggccctacttcttgacttgcagacggctgccttttcacttgctgttccctcaagtggtagggaaagagtgtgctcttccttttatggtccctcttccttttatgaggtcactaatccccttatggaggcccaccctcatgacctgatttaaacctaattactttccaaaggccccatctccaaataccatcacatggagggttagggcttcaacatatgaattttgggggtacacagacattcaatccatagcattctgccttttgtctcccaaattaatgttattcttacacacacaaaaaaaatgatcttatttcagtagcccccaaagtcttaacttattccaagatcaactctaaaattggaagtcctgtctcatctaaatatcatctaaatcagatataggtgaggctcaagatacgattaatcctgaggaaaaattcatccccagttataagtctgtgaaaccagataaattacacacttccaaaatacaatgatagattagacatagaataggcattctcattccaacacctggaagaaagaaaggggtggcaggttccaagcaaatctaaaatcttgtaatgcaaataccattagatcttaaagctcaaggataatctttggtttcataatttgccttctgggtctactgggatgacagtcccactttctggacaaactgggatagtagatagtcggacctctgtagctctgcagggaaggggtcatgtcctcatgactcttcattgtacccaaaaggctctggcagccactctgacaccaactgcccattgaaactgagatgatagccccaacctttaaatctgaggtggcagcccagataatctctaaaacacctttagggtctttcttcccttgtcttgaagagtaatatcacacattcacatctgaatagctctatggtccagtcccaaagaatctaagaagtctgacagactttcttcattttatcccattcccatctccttcagttcagactgacagtgtttctgcttatataatcccgtaatctctttatcgagtgagggtccagccacacctttggtggttttttttttttctcagcatgctttctcatcttttgcagtgtggataggctgagaactttccaattttttaagttccagctcctttttttttttaacaattccttttttgattcatttatctcttttttttttcttgcatcttagtagaagcagtcaggatgaacaaagtgactccttcaacactttgattagaaatgtcagctatgttcactgttaatttcatcacttactagttttacattccacaaaacaataaaacatgaacataattcagccaagttctttaccactttataaaaagaatcactttttctcaattgtccaatagcttattcttcatttctgtctaagccttccccagaatgacctttaccatacatatttctgccaacattctgtttataattatttatgtattctataagaaaatggaagtttttctccagcagtcttatattctgtataagccctaaacagaatagctattattgtgcatatttatagcatgcatccccaaattccttaacttctaccccttttccagttttaaagccacttctacattttcagctacatcccactcctggtacaaaaatatgtcttagctcaggatgttataacaaaataccatagcttgggtggcttaaacaacagacatttatttctcataattctggaagctggaatgtccaaatttaaggtgccagaaaatttagtttttggtgaagtctctcttgctgacagacctttcactgtattctcacattgtgtagataaaactctgatctttcttccttttcttataaaaacactaaccctgacatgggggccccactctcatgactgcatctaaacctaatttaacttcccaaagactctacctccaaatatcatcacattgtggtaagtgcttcaacatataaatttggagtgacacaaacagtccataacaatttgtaaaaaatacttgtagggacagaaataaatagtaagtagtatttatcctcaggataggacacattccttatttatcagggtatgagtatggggaactcagactgtctgatgtgtagctaagcttaaacctgttgtaaacttggttaaattcagttaaccactgtcttcaactattttgaaggaagggtgggcctgaattctggtgagagtccagataagtcttgatgttttatagtgaggctaccagccttttggactacgggagatttctctttgctttatagtctggctgccagccttttgggtcagtggggacttctatttgcttcccagtcctgtccctagctttctgccctttgagggcactcccaaactttggaaggacacttcagcacacattatgaaagcttgtagtgcattggagtgaattatcttagcttttctgctgcacttgtggcaaaatacccatccaagtttgctcctgtagtgttgagaatatctagatagtttcaagtaaattacagtgctatcaatcccaaaataaaaaaaaaatctttgttttcatgtcaggtcaccctatttcttttgtttggtgaaatgaccatgatttggctgaagtttttgaaatgatatctgaggcaatacctttaaagagggtatcagttatcatgattaatcacaacacaactaggtaggatgtttctgtctccctggagcatgctgagagatgacacttgttgtgtgcccatcagactaacactaacagtgtgtcaggagacagaaaataatgataaaatttgccattttaagctacaaaaatcttggggattatattggaatggattgtcatgaagagagaaaacatttgactgaaccaaatgtggattaagccaaatttatcaacatgagagcccttaaaagatattctaattttatgtgctggctcaaacagctgggagaagctaagaccatttcttcattgggttgatttaaaaactcaactaaccagggtggagccaaaatggccgaataggaacagctccagtctacagctcccagcgtgagcaacacagaagacaggtgatttctgcatttccaactgaggtactgggttcatctcactggggagtgccggatagtgggtgcaagacagtgggtgcagtgcaccatgtgtgagccgaagcagggcgaggcatcgcctcacctgggaatcacaaggggtcagggaattccctttcctagtcaaagaaaggggtgacagacagcacctggaaaattgggtcactcccaacctaatactgtgcttttccaatgggctcaacaaacagcacatcaggagattatatccagcacctggctcggagggtcctacgcccaaggagccttgctcattgctagcacagcagtctgagatcaaactacaaggcagcaacaaggctgggggagggcacccaccattgccaaggcttgagtaggtaaacaaagcggccaggaagctcgaactgggtggagcccaccacagctcaaggaggcctgcctgcctctgtaggctccacctctgggagcagggcacagacaaacaaaaggcagcagtaacctctgcagacttaaatgtccctgtctgacagctttgaagagagtagtggttctcccagcacgcagcttgagaactgagaacgggcagactgcctcctcaagtgggtccctgacccccaagtagcctaactgggaggcatcccccagtaggggcggactgacacctcacacggccaggtactcctctgagacaaaacttccagaggaacaatcaggcagcagcatttgcggttcaccaatatctgctgttctgcaaccactgctgctgatacccaggaaaacagggtctggagtggacctccagcaaactccaacagacctgcagctgagggtcctgactgttagaaggaaaactaacaaacagcaaggacatccacaccaaaaacccatctgtacgtcaccatcatcaaagaccaaaggtagataaaaccacaaagatggggaaaaaacagagcagaaaaattggaaactctaaaaatcagagcgcctctcgtcctccaaaggaatgcggctcctcaccagcaacggaacaaagctggagggagaatgactttgacaagtttagagaagaagtcttcagaggatcaaactactcctagcaaaaggaggaagtttgaaccaatggcaaagaagttaaaaaccttgaaaaaaaaatcagatgaatggataaacagaataaccaatgcagagaagtccttaaaggacctgatggagctgaaaaccatggcacgagaactacgtgatgaatgcacaagcctcagtagccgatgcaatcaactggaagaaagggtatcagttatggaagacgaaatgaatgaaatgaagcgagaagagaagtttagagaaaaaagaataagaagaaacgaacaaagcatccaagaaatatgggactatgtgaaaagaccaaatctatgtctgattggtgcacctgaaaatgacggggataatggaaccaagttggaaaacactctgcagggtattatccaggagaacttccccaatctagcaaggcaggccaacattcaaattcaggaaatacagagaatgccacaaagatactcctcgaggagagcaactccaagacacatgattgtcagattcaccaaagttgaaatgaaggaaaaaatgttaagggcagccagagagaaaggtcaggttacccacaaagggaagcccatcagactaacagtggatctctcggcagaaactctacaagccagaagagagtgggggccaatattcaacattcttaaagtaaagaattttcaacccagaatttcatatccagccaagctaagcttcataagtgaaagagaaataaaatcctttacagacaagcaaatgctgagagattttgtcaccaccaggcctgccctaaaagagctcctgtaggaagcactaaacatggaaaggaacaacctgtaccagccactgaaaaaacatgccaaattgtaaagaccttcaaggctaggaagaaactgcatcaactaacaagcaaaataaccagctaacatcataatgacaggatcaaattcacacataacaatattaaccttaaatgtaaatgggctaaatgcgccaattaaaagacacagactggcaaattggataaagagtcaagacccgtcagtatgctgtattcaggaaacccatctcacatgcagagacacacataggctcaaaataaagcgatggaggaagatctaccaagcaaatgaaagacaaaaaaaggcaggggttgcaatcctagtctctgaaaaaccagactttaaaccaacaaagatcaaaagagacaaagaaggccattacataatggtaaagggatcaattcaacgagaagagctaactatcctaaatatatatgcacccaatacaggagcacccagattcataaagcaagtccttagagacctacaaagagacttagactcccacacaatgataatgggagactttaacaccccactgtcaacattagacagatcaacgagacagaaagttaacaaggatacctgggaattgaactcagctctgcaccaagcggacctaatagacatctacagaactccccaccccaaatcaacagaatatacattctttttagcaccacaccacacctattccaaaattgaccacatagctggaaataaagctctcctcagcaaatgtgaaagaacagaaattataacaaactgtctctcagaccacagtgccatcaaactacaactcaggattaagaaactcactcaaaaccactcaactacatggaaactgaacaacctgctcctgaatgactactgggtacataatgaaatgaaggcagaaataaagatattctttgaaaccaacaagaacaaagacacaacataccagaatctctgggacacatttaaagcagtgtgtagagggaagtttatagcactaaatgcccacaagagaaagcaggaaagatctaaaactgacaccagaacatcacaattaaaacatctagagaatcaagagcaaacacattcaaaagctagcagaaggtaagaaataactaagatcagagcagaactgaaggaaatagagacacaaaaaacccttcaaaaaatcaatgaatccagaagctggttttttgaaaagatcaacaaaattcatagaccactagcaagactaataaagaagaaaagagagaagaatcaaatagacgcaataaaaaatgataaaggggatatcaccaccaatcccacagaaatacaaactaccatcagagaatactataaacacctctacacaaataaactagaaaatctagaagaaatggataaattcctcgacacatacaccctcccaagactaaaccaggaagaagttgaatctctgaatagaccaataacaggctctgaaattgaggcaataattagcagcttaccaaccaaaaaaagtccaggaccagatggattcacagccgaattctaccagaagtacaaagaggagctgctaccattccttctgaaactattccaatcaatagaaaaagagggaatcctccctaactcattttatgaggccagcatcatcctgataccaaagcctggcagagacacaaccaaaaaagagaattttagaccaatatccttgatgaacattgatgcaaaaatcctcaataaaatactggcaaactgaatccagcagcacatcaaaaagcttatccaccatgatcaagtggccttcatccctgggatgcaagactggttcaacatatgaaaatcaataaacgtaatccagcatataaacagaaccaaagacaaaaaccacatgattatctcaatagatgcagaaaaggcctttgacaaaattcaacaacacttcatgctaaaaactctcaataaattaggtattgatgggacgtatcttaaaataataagagctatctatgacaaacccacagccaatattatactgaatggacaaaactggaagcattccctttgaaaactggcaaaagacagggatgccctctctcaccattcctattcaacatagagttggaagttctggccagggcaatcaggcaggagaaggaaataaagggcattcaattaggaaaagaggaagtcaaattgtccctgtttgcagatgacatgattgtatatctagaaaaccccatcgtctcagcccaaaatctccttaagctgataaggaacttcagcaaagtctcaggatacaaaatcagtgtgcaaaaatcacaagcattcctatacaccaataacagacaaacagagagccaaatcatgagtgaactcccattcacaattgcttcaaagagaatcaaatacctaggaatccaacttacaagggatgtgaaggacctcttcaaggagaactacaaaccactgctcaatgaaataatagaggatacaaacaaatggaagaacattccctgctcatgtgtaggaagaaccaatatcgtgaaaatggccatactgcccaaggtaatttatagattcaatgccttgcccatcaagctaccaatgactttcttcacagagttggaaaaaactactttaaagttcatatggaaccaaaaaagagcctgcatttccaagtcaatcctaagccaaatgaacaaagctggaggcatcatgctacctgactgcaaactatactacaaggctacagtaaccaaaacagcatggtactggtaccaaaacagagatatagaacagtggaacagaacagagccctcagaaataatgccacatatctaccagtatctgatctttgacaaacctgacaaaaacaagcaatggggaaaggattctctatttaataaatggtgctgggaaaactggctagccatatgtagaaagctgaaactggatcccctccttacaccttatacaaaaattaattcaagatggattaaagacttcaatgttggacctaaaaccagaaaaaccctagaataaaacctaggcaataccattcaggacataggcatgggcaaggacttcatgtctaaaacaccaaaagcaatggcaacaaaagccaaaattgacaaatgggatctaattaaactaaagaacttctgcacaacaaaagaaactaccatcagagtgaataggcaacctacagaatgggagaaaatttttgcaacctacccatctgacaaagggctaatatccagaatctacagtgaactccaacaaatttacaagaaaaaaacaaacaaccccatcaaaaagtgggtgaaggatatgaacagacatttctcaaaagaagacatttatgcagccaaaaaacacatgaaaaaatgctcatcatcactggccatcagagaaatgcaaatcaaaaccacaatgagataccatctcacaccagttagaatggtgatcattaaaaagtcaggaaacaacaggtgctggacaggatgtggagaaataggaacacttttacactgttggtgggactgtaaactaatttaaccattgtggaagtcagtgtggcgattcctcagggatctagaactagaaataccatttgacccagccatcccattgctgggtatatacccaaaggattataaatcatgctgctagaaagacacacacacacatatgtttattgcggcactattcacaatagcaaagacttggaaccaacccaaatgtccaacaatgatagagtggattaagaaaatgtggcacatatacaccatggaatactatgcagccataaaaaatgatgagttcatgtcctttgtagagtcatggatgaagctggaaaccatcattctcagcaaactatcacaaggacaaaaaaccaaacaccgcatgttctcactcataggtgggaattgaacaatgagaacacgtggtcacaggaaggggaacatcacacacgggggactgttgtggggtgtggtgagggggcagggatagcattaggagatatacctattgctaaatgattagttaatgggtgcagcacaccaacatggcacatgtagacatatgtaacaaacctgcacgttgtgcacatgtactctaaaacttaaagtataataataataaaattttaaaaaagtaatgttcaagtttatttgggtatgaaattctaataccatccagagagagttcatgctgcttcaaaataattttaagtgtaattctacaaataaagaaaccatttatatcaataaaaaaataaaaccataaaattttaaaaataaagagatgaatattgaagataatctgattaggtaagatgttggtttatttcatttcatactctaagcacatttttttcataatggaattatgctctacatgccctcctcaggaaacttcccaggaaggtcatcataatgctgttgttttgtgctcattattgttacaaattcaaaaaatgtaaaaaatatgacaagaaatatacccaataaagatatttatggtgcaaacacatccctcttccactccttactccatctcactatttgccatttttcacttttctgaagatattctttacacatattagtgtatgtggggtagttgtgtatgtgttcatgtgttttaatagatacatttatttatatatgcatattgataggttagtagagagataacatcctgtgtcatcttataaataccatcttgtaacttttttctccttaaatatatcaattctctaactacagacttgcctcgctatttttaataaatgcaaaatattacattatgaagatgtgtttaacaacttcaggactggtagtcatttatgagatgtgtagctttttgctaatgcaaacaacactgcaacaaaggtctttgtacacccacttctgaatgaatatgtgcaaatttgtgtcaagtgaatacttttatgtatcaaatacatcaataatttaaggcctttaagtgatcttaggtcttttgcctaatatttctacatttaaatttttattgttttgaaattaaagataggaatttatttatttttttcctgattttaaatcagttagcacacacacactccattgaaacgttctgcctttacgtaatgatatgaaattactccttcatgataaagtaaatctccatacacatttgggttcatttctgaagcctgatatgaaatgctttcaaaaaccttgcttcgcattatttatttgagagcaagttaatttagtggttttgataagtatactttttaaaataaagaaatgcaaagtctggtatttaagcttatctgtccaagaagacgattaagtatttatacacagtcttagcattttcatgtctattatttttcctactattccagaaagattgtaacagaaaaaaaaggctaatataatggagatagtgggccagaatatatgttgaattacaatttcaaccttcactctgaggggcctagattagttatgctcaataacttggaggaggaaaaactagatcaaatttggaagcattggtttgtgttcctagtctacctgtctgtaatcttgagaaactttgattttctcagttttggaattgtcatcagctaaatatgaataatgaaaatgtattttcctaatttatatagtgacaatgttatccaatgaatcaatatgtcttatgtttgtgaagtatcttatacaatacattaagtgagaatgaggaaacactataggaagaaataggaaaaaaaaatcatattttaaacttacattattttaacgagtgcatgaagttgtcatatctttatcagaataataagtacatgtgaaggaaaaatttacctatttcataatccatatttaaaaaatcaccttgacattggctctgtttaagtgacggattacgtttattgatttgtgtatgttgaaccagcctttcatcccagggatgaagtcgatttgattatggtggataagctttttgatgtgctgctggattcggtttgccagtattttattgaggattttcacatcgatgtcatcagggatattggcctgaaattttctttttttgttgtgtctctgccaggttttggtatcaggatgatgctggcctcacaaaatgagttagggaagattccgactttttctattgtttggaatagtttcagaaggaatagtaccagctcctctttgtacctctggtagaattcggctgtgaatctgtctgatcctgggcttcttttttggttggtaggctattaattactgcctgaatttcagaacttgttattggtctattcagggattagatttcttcctggtttagtcttgggaggatgtatgtgtccaggaatttatccatttcttctaaattttctagttgatttgcatagagttatttatagtatcctctgatggtagtttgtatttctgtaagatcagtggtgatatcccccttatcattttttgtcgtgtctatttgattcttctctgttttcttctttattagtccagttagtggtctattttgttaagcttttcaaaaaaccagctcctggattcattgattttttgaacggtttcttgtgtctctatctccttcatctctgctctgatctgttatttcttgtcttctgctagcttttgaatttgtttgatctttcttctctagttcttttaattgtgatgtcaggttgtttattttaaaggccttcaataaaattcaacacctcttcatgctaaaaactctcaataaactaggtattgatggaacgtgtctcaaaataataagagctatttatgacaaacccaaagctaatatcataccgaatgggcaaaagctggaagcagtctctttgaaaaccagcacaagacaagaatgccctctctcaccactcctattcaacatagtattggaagttctggtcagggcaatcaggcaagagaaagaaataaagtgtattcaaataggaaggcaggaagtcaaattgtctctgtttgcagatgacatgattgtatatttagaaaaccccatcgtctcagacctaaatctccttaagctgaaaagcaacttcagcaaagtcttaggatacaaaatcaatttgcaaaaatcacaagcattcctatacaccaataatagacaaacagccaaatcatgagtaaactcccattcacaattgttacaaagagaataaaatacctaggaatacaacttacaaggaatgtgaaggacctcttcaagaagaactccaaaccacggctcaaggaaataagagaggacacaaacaaatgaaaaaacattccatgctcatggatgggaataatcaatatcgtgaaaatggacatactgcctgaagtaatttagagattcaatgctatccccatcaagttactattgactttcttcacagaattagaaaaaaactactttaaatttcatatgaaaccaaaaaagagcccgtatagccaagacaatcataagcaaaaataacaaagctggaggcatcatgttacctgacttcaaactatactacaaggatacagtaaccaaaacagcatggtactgataccaaaacagatatatagaccaatagaacagaacagaggcctcagaaataatgccacacatctacaaccatcagatctttgacaaacctgacaaaaacaagcaatggggaagggatttcatatttaataaatggttttgggaaaactggctagccatatgcagaaaacggaaactggaccccttccttacaccttataaaaaaattaactcaagatggattaagatttaaatgtaagacccaatatcataaaaactctagaagataacatagacaataccattcatgacataggcatggtcaaagacatcatgactaaaacaccaaaagcaatggcaacaaaagccaaaatagacaaataggatctaattaaactaaagagcttctgcacaacaaaagaaactatcatcagagtgaacagttaacctacggaatggaagaaaatttttgcaatctatccatctgacaaaggactaatatccagaatctacaaataacttaaacaaatttacaagaaaaaaaacaaccccatcaaaaagtgggtgaagaatatgaacagacacctctcaaaagaaggcatgaagacatttatgtggtcaacaaacatatgaaatgaagctcatcatcattggtcattagagaaatgcaaatcaaaactacaatgagataccatctcatgccagttagaatggtgatcattaaaaagtcaggaaacaagagaggctggagaggatgtggagaaataggaatgcttttacactgttggtgggtatgtaaattagttcaaccattgtggaagacagtgtggtgatttctgaaggatctagaaccagaaataccatttgacctagaaatcccattactggatatatacccaaaggattataaaacattccactataaagacacacgcacatatatgtttattgcagcactatttacaatagcaaagacttggaacccaaatgcccatcagtgatagactggataaggaaaatgtggcacatatacaccatgggatactatgctgccataaaaaagaatgagtttatgttctttgcagggacatggattatgctggaagccatgattctcattaactaacacaggaacagcaaaccaaacactccttattctcactcataaatgggagttgaacaatgagaacacatggacacagtgaggggaacatcatacattggggcctgttagagggtggggtgcattaggagaaacacctaatgtagatgacgggttgatgggtgcagcaaaccaccatggcatgtgtgtacctatgtaacaaacctgcacgttctgcacatgtatcccagaacttaaagtataatgaaaaaaatcatcttggcaaccatgagatttagtcttgcttgaattaattttctttcttcttagatgactctccaaacttacatgcccaaagtttgtattttgttagaaacattttcttgatttcttctgtggcatactcattttctagtccctctggttatttttccctggacatgttggcagcagtagaggctaattattttgaatctcggaggcttaaacggaagtatgagagtgaggcagtaatggcatgaaagctccctgaagagctatgtattctatggatggccatcagttggagttggtttcttgaggttgacccttcagtaggtcagagagagctgggttgatgttaaagagggctgagaagaaattcaaacaacaaactggtttgaggatcatgtttgggccccaggtcagtcttccaggactccgtatctccatgtcacattccagacaaactgatggattacaacccagcatcaggtaaatgttgaagggatttggagagggaatattaattaaagttgtcatcacttcgtggagtaggctgaagggagcactcaggagtagaactataaaataaaaattttttaaaatgtaaaaaggtttattctacaagccacatacatttttgtttgagagaacaataagcttatgaaaagtatactgatgtaggattcaaaatattgtattattcaaatcttttcttctgaatttactagatctataaacttgagcaagtcctacaacctcttggtgcctgcgtttcctctcttctgttatataaaaaaatcgttctttagaggcatattataagaagaaaacaaacatacttgtatgaaagcaattatatacttaaaatttaagtttatggatagaaaatttgatatgaactatctggtgtttgccaatctttgttaaacactattctattattaggagactgatggaaaaatatgtgttaccaatcatgttatttacctttgaaactttatattttcatttaagtatttttaggtgtacctttttttaaccacttttctagactgaaactgctatttccattacaaagattgtagctattaagatgttgatttttgagaaaatttagctctgaaaggcctaccactcagataatcaaaggttgtttaaatccattagctgggtgtggtggtgcacacctgtaattccagctgctctggaggctgagacaggagaatcgtgtgaacctgggaagcggaggttgcagtgagctgagatcacatcactgcactccagcctgggtggcagaacagaaacaaaaacaaaaacaaacaacaacaaaaagttgtttaaatctatgacaatttagaacaagggaatctgatagcatggaattaaaactatagcaaaagttcttacaaagtaacatgaagaggaagtatataaaataagtcaggtagaatgaaaatctaaatattgtttcagttttgtttattaacatattatattagagccatgcttagaaagttaatgaagagtgtattaggatgtaaacgtttaaaataatgggcttcatgtgttcttaaaccatgtggtcagatacttctactctgctcacccttcgtttttttgtgcactccatttgccagagatctatagattcttctgtctcccagctccagtttttcaccctcaaggggattatcagcctgtttttaacttttgatttaggcgaattccgtattattcttatacagtcagaaaggcaagaactccctgcatcctttctagacatttaaactgaattactgaatttagtcttagatctttcatttttattttctatttttcttccatttctttttatattcatatatttgacagctacttatgtgactattactatgtatcagacaaaaatttaccatctttatgtacttcttttttctgtcttatttttttctttccatttttcttctctctttactttctgagtttatctgctgctattatttccttgttactcattttacctctatttcctataaattttcaatatttaagcacaaatgaagtatatggaaaaccaggggaacaggctacatatacttctttaataactttactgttttcctcgggtaaagtatataattaattttattcataactttccaaacttaccccagaaacttaatagtacttaatagaacttaatagaaacaaatagctgtgcctactggaagagaagcagtagaaaaatataaagattgtgaaaatgttattactaattttgaaatgtaggaaaagaaacacagctttcttcagatttagaacattatctgagttctaactaaatgagattctgaaagagactctagcaagaaaacaatccagacagaatgaaggtagcattccaaaattgtctttttaggattttaattggacaaggaattacttgaatactgattaagaagtattcttctataagaaatcctacaacacagaagaagtcttcctttgaccataatagataaggcaaaatttgattcagaaatatatatgtaaagataaaattgtttctcagtattgaatcaaaatatattcatataataatcttctaatcaactggcagagatatgtgttccatttctttggggatacaatacaaaatgtaatcatatatatatatatatatatattatatatatatatatattattttttttttttgagacggagtctcactgtctcccaggctcgagtgcagtggtgcgatctcggctcatggcaagctccgccccctccgggttcacgccattctcctgcctcagcctcccgagtagctgggactacaggtggctgccaccacacccggctaatttttttttttattttgagtagagacggggtttcaccttgttcgccaggatggtctcgatctcctgacctcatgatccgcccgcctcggcctcccaaagtgctgggattgcaggcgtgagccaccccgcccggccgtaatcatatttttaaggctctattcctaaagactcactgtcccaggtgagaaatgggagaagaaaggaattggatagcaccagtttgaatgaagagtggcattatagagatacaaaatgacaaggtttaaaaaaggagacgtcccagaagtttctagaatcacttctatgtaattttaccatgtgagtagtcctactaatattgcagctactgcttttgtattatatgtggtcttttataagtttttttttaatttacaaaggaaatatacatttaattgtcattaaagtactatggagtttatatgcaagtattttaattctcttgatctggttgaacaaaccaggtcacaagggtatgaagtgacatatttaaagtccatgcatttttagtaagtaaaataaatgtatttattggttaattagttacatcaatttgagaattagcaataaaaccctaaaactgccaatggggcatattttaactctgctttgacctcttgggctctgaattagtaaatgatgtatatgggtttggttgtgatgaaatatcagtgaaactgattgaggtcataggtgaaaaataatgatatcaaaatgctaatgtaatctaggaataacatatcagagcaccaaaggaaaaagcttcatgattgctggtttcaactaaattcaaattgattaacatgtagtaaatatctattatatttaacatatactcttatgtctaaaagtcacgtgctgactcttttcaaagagtatgtaatcgatatagtcaggaaaacatatcgagtacaaaaaagacagaaaaaaatctctatctctcccatatatagatatatatctatatatgagtatatatgtatatcatgaaaaaattatcaaatcatatatacatgatatatatatatcatgtatatatatatatatcatgtatatatgtcatatttataaatgagtatatcatcaagaaattacaaataaaatgctctggacgaccagtaagaaaggagagcaggaaatacttaaggacatttttatatttgagatgatccttacaggatacataacaacaatggcatttcacatcagcataaatacaaggggtcaagggggaaggtcacaagtttggttggatcagtgaatatgtctgcatggttcaagcgattgttatatgaggcctgagtccaaggttgcattttaatataatgtgtcagaatatggagagccactgaataattttgaattgaaatgtacatggccacattttaacgatggaaagactgttctccaaaccagctaggttgttttgaagatgagagaacaattgtaagtaagaataccagtttgaaagctagagatcatgggacactgaactattttctgtatgtctgccttaatgtttttagatagatacagatttaatagatagatttgagagacaatggtgaagaagaaattactccagctgacatcttacgtgacatgtatgcaattataattcaaagagaatgatgacctctgcataccaaaagaattgttattctataagcaaatgaagaaattagaagtgttaatggatggatactaaaatcagttttgaatttagtgattcttatgtttagctgtgaagcaagtttttatccctatcatttctcactgtcactcatttcattcacacggataccgtaactcagatgacacgatttgaaatatagagctggccaactaagtacatgaaccctactaagtcaggatcacaagaagaatatgacatagggcaactgagaggatcagaaaagtaaatagaggatcctgagctgatttcagagcagtcacattttgtttactatcctctaataaatatttgtttattgttacaaatatcattataaactgcataaatgcataaaaataaaacaactgtaatacatctggggattcataattaggtaagtatataataattgttaatagtcattgaattattagtatatgacaagaactgagctatgtttgcaatgtacactctattccttaatttgtacactagttctatgagatgggtataattatgcttatttgaaagatgagaaaattgaagcacacaaagattaaatgacatctccaaagtcacacagctaatgaatggaatgactgggatttggaggaaatcccagtcttttataaatgtcttttataaaacaactagagaaaaacacaagacaaatttactaaaagataagagtcaaacaaaaaaagaaatttgggattgtagggaatggaaaaatttgcaattggagttattctttagaaattatatgataaaggaattgtgtaatttggatgggcaaagagcaggatagaggcaattttggtggaaaaaatagtatcagtaattagaaaatatgagaataaagaagggagagagagggaaaatgattaagtttatatgtgctgagaatgatgctgagagattacaaattcatatacatcctcaaatttcaaggattcacatatttaaaactctttctggtgatttcttccagagattaaaatttcatcaaatgtatccagatatttttaaagttgcattttcacagcaaacaaatttctaaggactgattgtttttttgtgtgtgtaattttgtttgtttttttggcttttttctccctatttttaaatgttctgagtaggactagcattaaagcttggaaggggtaaaacgagtcatggcactccatccttttatcatgcagactttataaagtgctccagttcttatggtgttttctgaccaggatctgtaccaagcagatgaacatgccaagatgtcttcgttctccctggctgcacatcctcctgtagtcttcatgccggccttcgtttgacctgtttttgggaagttctgccttttccttctattttaatctacactctgttgccaccattacatatccatgcatgtagagttgatggtagtatactaaaactttttagaagagaagatatgaaaacccaaatggagtgaatagctaaccagaagacatatattaaataagcaaaattcccaactatgttgctggtgtggtatttattctgttctcagtaatctttcaatattacattgatgatgttgtctccacatttcatcataatcaggatgtagatgcaaatgatattttactgtaatgaagatacagatgccgattagagcaaaaatgaaaatttcatcttggcatctctgatctctaattctcagtggcttcctcctactgttgatgtctatccctaactgtgggtatttagaggtctcagctggaatttcacctcccagtgctaacatgtggatcaacaatcaaagctcgctagatgattttatcctattgggattttctgaccgtccctggctagagacacccctctgtaatctttctggtggcctacatcttttccctatttggaaatatctccattatcctagtttcccatctggatccccagcttgacagtcccatgtacttttttgtctctaatctatcctttctggacctctgctataccaccagcactgtcccacagatgctggtcaacctccggggaccagaaaagaccattagctatgggggttgtgttgcccaactctatatatttttggccctgggttctactgaatgcatacttctagccatcatggcctttgaccgttacgctgccatatgcaagccccttcactacccagtcatcatgaaccatagacgctgtatccacatggctgctggcacttggatcagtggctttgctaactcccttgtccagtccactctcacagtggtggccccaagatgtggacagagggtgttggaccatttcttctgtgaagttccagcccttttgaaactagcctgtattgatattcgtgtgaatgaaatggagctcaatgtactaggcgctttgcttctcctgatgccactcaccctcatcctgggcacttatgtgttcattgctcaggcagtaatgagaatctgctctgctgaaagtcgctggaaggctttcaatacctgtgcctcacatttgctggtggtctccctcttctacttcacagccatcagtatgtatgtccagcctccctctagctattctcatgaccgggggaagatcatggctctcttttatggcattgtcacacccaccctcaacccattcatctacacattgagaaacaaggatgtgaaagctgccctgagaaggtcactgactaaagagttttggattaagacaagatgatatctgaaaagaagtcctaagaagcgaggatagatgtgtttgactttcaaaaagatgttggacatggaattgatgagggaacagtatcaagtgacacaaagtttacaagtggaacaagactaagaaaaaaacaattaactcttggtaaaatctacatagcattttttcacttacgagactatctgctttacaatattggattccatcaagtcagtcttttttctccctattcctaatgactagctaatctagttaaagtaagggaaaatggtataatagctagagaaaaagatactgagaaagtttaggaaatatatttagcataaattgtttataaatgaatcccaattaaattagaaatgatcccaactcttagaaaaacatgccagtactatcgtgaggtaattttgatcaacatgtattgccaccatttagccatcttctaacattcgatgtccaattatatcaccctcaaatgcttttgtaaggtctcacaggcaagtaaaatcaagagacaattagttcaaaaacattaagatggaattatggaaagagaaattaatgaacaaatttagaggtgatgattttaaatatattttttttgccatgaattcttttaaatacaaattttttttgccataaatgttttgccttagtcaatcttatgctcttgtggtacacaacaatgaggcctaggtcaatgcaaatagaacttactctggggggaaagatgaacagtgagatgctttggatagtgatcagcaggggaaaaacctgaggtggaaaaaattctaatttagggacacaaactcagtgggaatttacatgttttgacaaggcagctttcttcaccacttgactgggtaatttagtcctatttcagtgtgggggtttgagaataccatgtggaattcaaaactttggttgatctattatctttatttagaaaaaaaagacttttatagccttttgctataaactgcctcacaaacctatgagccgaagaaaccaagacaaaatagagtgagttcaccaaaaaatccacatcattaaaagaacagtgcaaagctctatttcctgtactgtgagcatgtccactttctgtggctcccggtggtgagacagatgagaagctggaacacagataaaaggtttttgggaacacttttgaaggcctgtggctatataagagaaagtgagttcatttccttaattctagtataatctggaaaaggatcctagacattatgcatttttttgatcacagtatttttcccaacccatggttcatttatacatggagtctgctattggcatgaaataaaatacatcctaatatgtattatgaaaaaaacgcttattgtatttatttattctattaaagcagtatatttctcagaggttgaatgttgggggtttttgtggtcatttaataaaaatgttaacatattcttgagtttgtttgtttaacttagaagtataaatagaactcaaaataattgaacattgaaactactgtgttgcattggaataaacatggatatattatgttgagaaaatcacatgtatttttaaattaaaatatgggtgcttggagaaatgttttgctgatgtgggtggctgctcaagatatgtcccccaagccctagaaatatattttgattcactttcattattacagatatgccagagaaaaattttatctttaaacagttttaaatttttgactttataaaggtataatatttctgcatgtatgctgcctgagattttggaaggctatatatttaaatatatcattaaataaattatagtacctgtactatcaagcaagcaaatcaaaataaggcaatgttgaacaagtttaataaggaaatattttaagtattcctgaaagtattaccaaaacattagtaaagttattaaatattaaaagttactaaatattacatcaattatgcaaataattggcaagccattaaatagaaataggccctgtgctataggagcagtaggaaaacatattcaataaggtaaaaatatttatatcagaacaaagtctactatcatatttattctaggagaagtggataattcccaacacttttagaaataatagaaattttctgactctcatcacagttatatattgttggtttggattaactacccaacatgatttaaaaataatattagtaaattattaaataaaaatatttatttgttatatcttataaaacaacataaacagcaacatttaaatgagctgttgctatgatgaggtttatcttatgatgaaaatgcattcctttatttggtaaatatttattgatggcaactatgtacaagtcactgaaataaaattagacatttacctttacatcaaggaatacaacttttgaaaaaaactgagaaataaaaaaggcagaactgagcatccagactaaggcagaatttgtcataaaaagtgtcagaaaagataatgctaaacatagaaaaatctttcacgacttgcagaatgatgtgatttggctctgtgtccccatccaaatctcatctcgattgtaatccccatatgttgagggagggaggtgactggatcgtgggggtggtttctcctattctggtctcgtgacagtgagttacttttcatgagatctgatggttttacaagcctctggcatttcccctgcttgcacttctctctcctgccaccatgtgaagaaggtcagtgcttcctcttcaccttccaccatgattgtaagtttcttgaggcctccccagccatgtggaactgtgagtcaattaaacctcttttctttacaaattacccagtcttgggtatttccttatagcagtatgaaaatggactaatacacagagagagggccctgcttgagtttagctgagcgctgatttgcatgtgtgtgaggaagctatccaagaatgaggaaagaaccacttaatggattaaggtaaatagtgcccaatgcttatgcaaaggctgggaattttgtgggttctcaagctatttatgtgccagaatgaaaacctaagaattcctgaggcattgagtttagcaatcaaaagtgtcttgcttcaagaatttcaataattagctctaaactaaacactgttctggttttacctaacaaatcttcaaaacaagtgactaaagtatcaaactgtatccaagtaacttagtaacactccagaataaactcaagggtatttataggattacagatatacccagtaaaagaaaattttccaatgaaaatttactaagcatgaaaaaaagcaggaaaatatgatgtaaggagaaaaatcaataaatcaaacctgactcagaactgacacatatgttagaatgattcaagttatggcattaaaacaattatactgtttaccatatgttcaaaaatttagagacgaggaagatactttaaaaaatcaaacttctagagatgaaaaccacaacgtttaaatatacataatacctaaaagcactgaatgtaattcatagtacactaaacattgagaagtcccatgatctgcagttggcatgctggagttcctgggccttgggaggaggctctgtgcaggcctcccagggccagtcccctggggtctgctctatacaggtcacccgaggcgttagggtgacctcggagcctgccactcccgacagccagacccagggcctgcgttctgctctatccagggcctccctgaaagcccctgcccgactaggcacagctgcagccgccaaagtcggtgcagtatacccggggctcctgtgtgctgggagcaggcaggagctctgcccaccctgggcgcggctgcagccacccacgtcagggttgtagacttgggcctccatgtgctcttgagggctgggagcaggcaggagccccacacccccaagcacagctgcagctgtccaaatggagacagtagatgtgggcctccgtgtgctcttgagagccagggaaggccccctttgccattgcaggctcagaggtgcctgctcctactgcctggtctcttcccactctctgcaactgatccaatctaggagtaggtggagctgagcccaggcactgtcacaaccctgccaggtatatgcatgatcgagccctgccacctcagccccctctggatgttgggccagacaagagtggatgcgggcaaagcgttggcctgcaggtgccccttggcaccatgaaaggcgtcaggaggcagacgggctcctaggtggaagggagtgggtccctgtaaggccccatcctcaggccaggaagagcctgaaggctgggggtcaggctgccacaccggtggactggagtggggtcttgtggtgcctttttctgcccacccatggccacggatggaccactccatatgcacttcctcccctctgaggtccataaaagccccaggatcagcaatagcatggtagaggacaactgagagatgacgagatgaccagctgcagagagtagctatcctctctgctgagagctgggaagtcaatggggacctgcctgcagagaggagccacctctccaaacacacccagaatgatgttcgaccaaatataggcctgtctcattttattgtgcttcactttattgcacctgaaggtttgtggcaaccttgcaagagcaaatctatcagtatcatttttccaacggcatgtgctcccttcatatctctatgtgacgttttggtaattctcacaatatttcagactttttcgttattattgtatcgttattgtcaggcctctgagcccaagctaagccatcgcatcccctgtgacctgcatgtatatgcccagatggcctgaagtaactgaagaatcacaaaataagtgaaaatggcctgttcctgccttaactgatgacattccaccacaaaagaagtgaaaatggccggtccttgccttaactgatgacattaccttgtgaaattccttttcctggctcatcctggctcaaaaaacctcccccactgagcaccttgtgacccccactcctgcccgctagagaacaacccccctttgactaattttcctttacctacccaaatcttataatatggccccacccctatctcccttagctgactctcttttcggactcagcccgcctgcacccaggtgattaaaaagctttattgctcacacaaagcctgtttggtgatctcttcacacggacgcaggtgaaagttatggtgacgtgtgatcagtgatctttgatgttactattgtaattgttttagggaaccacaaactgcccatgtaagtcagtgaacttaattgataaatgatgtatgttttgattgctccacccactggctgttccaccatctctccctctcttcaggcctctctattttctaagacacaacaatattgaaatgagaccaattaataatcctacaatggcctttaagtattcaagtgaaaggaagagtcacatgtctcttatttaaatcaaaagctagaaatgattaagcttagtgaagaaggcctatcaaaagccaagacaggccagaagctagggcttttgcaccagttagccaagttgtgaatgtaaagaaaagttattgaaaaaaattaaaatgcgctactccagtaaacacataaataagatagcaaaacagtcttattgctgatatggagaaaattttttgtggtctggatagaaaattttaaaaagctagggaaaaaaagaaaaataaatccatgtcagtagaagccagaaaataataaagaaaatatttaataattgaaagtaataaaatagaaaataatagataaattaatttttgtattttttgtagagacagggtctcaccatgttgcccaggctggtcttgaactcatgtgctctagtgatctgcctgccttggcctcccaaagtgttgggattgcaggcatgagccacctcgccctgcctgagttaaacttctagtggaaaaccccttttatataagccacaagcagtttcagactgtccaatgttattattactaacataaattaatgtaggctttcttttatcctagaggagttgtggaaaaacatcctcatggcatgaattatgagtcagaatattaaaggcatagacacaggagttggaaattgaaagtgtagatgaaaaaaaaagaaaaagaattttacaatatcaaaattagattttttcactgaattcaaaaaggtctccacaaaacttttgtaagggattcaaacccttcctttaaaaaataaataaataaatatttcttaatatcagtctgtagttactgtatcatcaggaacaggttttgaaaattattgtttatgctgagaaaacaactatctgaatataactaataaccattattactagattgattctaggaacatagataaatttaaatttatttttaaaagacaaacatttttaatatttgaaaatataggtcaccctgagctttctagtaattggaatgaatgacaattgcttttgtttgctaacacatccatttgtctacaattttcttaatgtatttaattctgaaatgattcattcagtttcggtctgatgaagagagtaaagtgaaaatattactcatcaattgaaatattactatagggtctttttgtaactgatttctttgtcattggatgctcttagcatgtattgattagatttaatcaatcttaaaaaaagaaaaacacacatctctcaaattttaatgtgcctttatcttggaaagtattttattaaagtttatcctatttgaactatcccacagttttctctaaattatccattattgttgtatgttgaaatttttggattatttgtctactaaccaccatgtataatattgaatccacctaccatctgtatccaaagcttttacaaaaacattgatcagatcacaatcaaagtcaatgttaaaatagaaaattctttcctcaaaatgaaaaaaacctgagtattttttaatcattcattaattgtctcttattgttcataaacagccttatgaaaacgtgtgatccttactgagacaccatattgtggtacttaatgtggtactatatttgtcactggagatcaaaataaagtttattggtctgcaacatttacaattcagtttcttatatttatatatataattcatatatataatacacataatataaatcatatacattatatatatatatatacacacacacatgggaacttagagctatttttaaacatttgccaagtagaatatacaatatattaaatttttgatattaaaagttttaaaaaattttctttcaatgctaagaaggtagattttatgttaagtgtccttatcatgatttcaaaaatgccttttccaaggcattcaattaggaaaagaggaagtcaaattgtccctctttgcagatgatatgattgtatatctagaaaaccccatcgtctcagcccaaaatctccttaagctgataggcaacttcagcaaagtctgaggataaaaaatcaatgtgcaaaaatcacaagcattcttatacaccgataacagacagagagccaaatcatgagtgaactcccattcacaattgcttctaagagaataaaaacctaggaatccaacttacaagggatgtgaaggacctcttcaaggagaactacaaaccactgctcaatgaaataaaagaggatacaaacaaatggaagaacattccatactcatgggtaggaagaatcaatatcgtgaaaatggccatactgcccaaggtaatttatagattcaatgccatccccatcaagctaccaatgactttcttcacagagttggaaaaaactactttaaagttcatatggaaccaaaaaagagcctgcattgccaagtcaatcctaagccaaaagaacaaagctggaggcatcacactacctgacttcaaactatactacaaggctacagtaaccaaaatagcatggtactggtaccaaaacagatatagaccaatggaacagaacagaggcctcagaaataatgccacatatctaccagtatctgatctttgacaaacctgacaaaaacaagcaatggggaaaggattctctatttaataaatggtgctgggaaaactggctagccatatgtagaaagctgaaactggatcccctccttacaccttatacaaaaattaattcaagatggattaaagacttcaatgttagacctaaaaccagaaaaaccctagaacaaaacctaggcaataccattcaggacataggcatgggcaaggacttcatgtctaaaacaccaaaagcaatggcaacaaaagccaaaattgacaaatggaatctaattaaactaaagagcttctgcacagcaaaagaaaccaccatcagagtgaacaggcaacctacagaatgggagaaaatttttgcaacctactcatctgacaaagggctaatatccagaatctacaatgaactcaaacaaatttacaagaaaaaaacaaccccatcaaaaagtgggcaaaggatatgaacagacacttctcaaaagaagacatttatggagccaaaaaacacatgaaaaaatgctcatcatcactggccatcagagaaatgcaaatcaaaaccacaatgagataccatctcacaccagttagaatggcaatcattaaaaagtcaggaaataacaggtgctggagaggatatggagaaacaggaacacttttacactgttggtgggactgtaaactagttcaaccattgtggaagtcagtgtggcaactcctcagggatctagaactagaaataccatttgacccagccatcccattactgggtatatacccaaaggattataaatcatgctgctagaaagacacatgcacacatatgtttattgtggcgctattcacaatagcaaagagttggaaccaacccaaatgtccaacaatgatagactggattaagaaaatgtggcacatatacaccatggaatactatgcagccataaaaaaatgatgagttcatgtcctttgtagggacatggatgaagctggaaaccatcattctcagcaaactatcacaaaggacaaaaacccaaacatcgcatgttctcactcataggtgggaattgaacaatgagatcacatggacacaggaaggggaacatcacactctggggcctgttgtggggtggggggagtggggagggatagcattaggagatatacctaatgctaaatgactagttaatgggtgcagcacaccaacatggcacatgtatacatatgtaacaaacctgcacgttgtgcacatgtatcctaaaatttaaagtataatttaaaaaaatgccttttccataatcacacatatttaagaatggaattcattcacttttgagtaaaaattattcatctgggggattgttaaaatgagggctggattatcagtttcagagtaattttagaaaagacaccatgtttgaagaaagtttagctctctaagtcatggttttattctgagattctttgattctactattatgtatgggtttatgtaaataattactaagtattccttttttttttttacataaggccagtgcaatcatgcatgattttattggtgaccagttaaaatgaaactgttaattaatgaaaaaaatcctttttactagaaaaacctgtgaacctgtgttacagaaaacgagttatgtataatattcatttttttaacctgaaatgcatcgactacaagagttagctaaaccaagataataattaactacttcccactgaggcaattccctgagggagaggtccatgaaatctcctgctttgaactcatagtttttatctgaaacaccaactttcctgcacaggatttttgtccccagtgcctggacagcactggcttcatttcaaataccccttagttaataggaaatttaaatgtccctgggcagttacatcctgtttggtcctatataaaagcgtttcagtcctttccttacatggaaatttcactgactgaaacaccagcttgattctagaacaaagatgctcagtctcaggatcaattgagatttgtttctaccgagagatccactctggtgagtaaaacttcttcaaattttatggaatttatccaacatttatgtagcacctgcttagtgccagcgactatgcgagtcttcaaagttataactctaaataagatacataatttctcactccttaactaagaacagtttaaataagctgcgatatctatgcaaataaggtagtataaattataaaaaagtatataaagcataaaaaagttagtataaattataaggaatcttaaatgaatgcaatctgggctccaaagagtgacaattcttcttgggtcgacagttaaactcaggtgaattataaatggaaagagacaatgtagctgtgttaaaagatagttaagtatttgccaaacaaatgaggggagattttttttctttttttttcttttttttttttttttttgagacgagtctcgctctgtcacccaggctggagtgcagtggcgcgaccttggctcactgtaacctccgcctcctgggttcaaacaattctcctgcctcagcctccctagtagctgggattacaggtgcccaccaccgtgcccggctaatttttgtatttttagtagagatggggtttcgccattttggccaggctggttttgaactcctgacctcaggtgatctgcccacctcagcctcccaaagtgctgggattacaggtgtgagcaaccgtgctcagccatgaggggcaattctaatgggaggacttccagacaggagggatagtgtgatttaagaaaagaaacacagcatggtgatacaacctgattgatttattaagagtaattaagtcagtcgccattattagacatggagattggcatggggttagagaagtcacaatgatagataatactggaatggcagtcaggaagcattgtaaagatattgtttgccatcctaagctttttgggcatcattgcataatcaagtcaataaagagctaaaagctaaattaatgttacaagatgtgatctgcatcaccatttgtcctggcaacagcattgaagttggattagaaatacataaaactgaagaataaaatattgccagagataatgaaggtttgaactaatctgtacgtgtgacagcaagatgtaataactacaacagatagtaagcaaataaaattttggtgtttgattggatatacagattaaagcaaagttgtgccattctttgaaataggtcacagtgacagggagatgtctgggagaagagatgagtccttatgggaaagacccattcagggacagtgatgtgccaaccgtgaagcaggatatgaggacctgcaacccaggggacctgcaacccagaagacctatggtagtgctcgaaacagcagactattattttctattgtgtaggaaaatagttaatctgtcttctttaaaaggcacaggaatatttttgagtaaacaaaagtacagaaagaaagtgtcaggacaaatttttggaaaccatcaaatttcaataaatgttaaaagaagacccagataacgagactaagaaaaaatattcagagaggaaatagaaaaccagaactaagtggcatagagccaatggaagtcagctgttttagaagaaagaactgtataatagtgtcatatatttgagaaacaaaatttaaaataaaaacaaaatagaaagagtgcattgaatttaccgttgtgatagttatttgtggatttgctggagctgtttgtgaggactcatgaagcaagaatgattaacatggttcaagaattgaaccaaatgtgccagggcacagaatgataccctattctgctcataaagcatggctgtaaagagaagggacattataagtaagtcctaagtgtggagtgaagacttttctttttctttaaaatggatgagtcttaagattatctctatctatctatctatctatctatctatctatctatctatctatcatctatctatctctaatctatcatctatcaacagagcatagtgaaacaatctggttcattaagagtaatctcagtaaatcaacattattagaatttttagacatggagtttgtgttgattttatacacacacatatacagacacacacacacacataaaatgtgcactattatgaaagagagagagagagcaagtgcatactgtggcaaagatgccctttgcgatagagcaaggttgagtatagggttggtcactgacttggaaaggaaaaaagagctctttctctgcctttgaaaccctagagtgggtggaattaaatcatgttagagatcatttcgtttatatacaggtaggaaactgaggggcttaacatataattacctatgttttctcattgaagttattggcaatgctacctcccaggaaatagaggaaaatagtgaagaagagacacaggatgctaactctttagagcagctactggaatgaattagagtttatctacataacatatttgcacatgtaccactgaacctaaaagagaactactttcaaaaaaattgagggtttcaacatatgagaggtaaaaaacggaaaagtttagaaatgttttgtaggataaaatttgcatacaagtggttagtgaagacagaaaaaaatgcttgggggaaacaaatgacattgaaagaatcattatactctccaccaaaaaatgtttagttttattataaataaagtatttaatgcaggtatgacttggaaggattgaacacaggttttatatgttctcgcagtatcatccttaatcctaagagtatctccacacgtatatgattcccttccttcttatttgataagtgatgaattaatcaatacaatttggaactagtgaaattaaaatgatgaaattttccatttattaatcagatataaaaattattatctatgtcttcaaagaaaataaaaatgaaaataggttggtgggagttgttgagaggagaatatggtgtgtgcattcaagttttttcttacgatttttctcctccttccctctatggagaaaccttaatggggaggctaaatgatagaggtttttcttagattacattaacaatgtgtattagaagtggtaagtaacacgatgcttttgattttcaagccagagacagtaagttttaaaatataagtgaattgctttcatctattcacattttattttaaattccaaaactaccatccaatatttggagcaagttaagccaggcattaagattggcagcactggggattaagctatatcttatggaggaccaggaaaactgtaggagcaagaaagctagagaaactttgaagaaagtaacccctgttttcctctgattcctactgccatgaagcaggggatgtgaccatcagtgagggattaagggcccttccagccctgagactgttccttgtggaaaaaaaaaatttcctaaaaattagtttcagtcagttctcaaaataaattacagcaaaatcaaaaagatcttggtttaagtgatttttaaccttttcctacagcttagggattaataaatgaaacaaactacaatatcagatgcagttacttcaaaatcagatgcattaactcatgtaacttagccattaagtttttgtctatatagaactgaaatcaattatgtagatatcccgttaaataagtatttacttagaacctatatgttagatgcctttggtcaagggtgaagaaatggacagaaatgatgaaggaatagtctttgtgcagaagaaactcagtgaaaatgatactgattgacctttcaacaaatgcacagatttaaaaagaaaaaaaagaggcaaaaattagttagcagagtgattctgatacacaaaataattctatgatggtgttgattctataataatagcacatttaaaatgaaataggaaaagttacatcatttaatcctcctaacaattgttacatctggtatagattttttttttgtttggttggttattttaagaaatgggctcccactatctaatatatttcaagtcctagaaagaaatatatatatatattttttcattcaggaactcacaatgagacacagcactagaaagatatatactctactacctagcattctgcctatcacatagattttagaaaatctctttatttcttcaaatggatttgattgaaaatgtccaaccccaagttgtcataagaattttgagaattaaacgttctttgacggtgaacctttgtcacttagttgcaagatctccaaagctcaggattcaatgcctgatatcagtggcatctgcattttacaattttgagacatttcatttttcaaaatttctatgaaaagtttattacaatcaaatgtaatctttttaaagtgttaagagcttttcaaaggaaaaaatatgactgttctttgagctaacctctcttctagattagcttctgagctgtttctagatctgcctctgagctgtttctagatccatttgcaaggtggtatcaataacttcatgttagctggttagcaaaagaagctatatagtgcatcgttgtaatactaaggcatcatatagaagatgtaatgagattggtatgctagaatcattttcattgactttattgaaggtaaagactttatcatttccatcaatttctccctctttgacaatgcaaactctgctccagaaaatgtttatgacttgttgatcacattcagggattctatttctgaataattgctaaaacgtttttgaattgaatattaactaatcgcaatgaaaataaattcatctcatttcagtacctccttgctgaggaattgagttacttgacacacaaatatattagatgtcatgcattttcttcctactgtctttggcttcctaaacagagtcacacttggtatcttcagagagactatggtcaatttgacttcaatgagtggattccttcttatggggttttctgatgagcgtaagcttcagattttacatgcattggtatttctggtgacatacctgctggccttgacaggcaacctcctcattatcaccatcattaccgtggaccgtcgtctccattcccccatgtattactttttaaagcacctctctcttctggacctctgcttcatctctgtcacagtcccccagtccattgcaaattcacttatgggcaacggttacatttctcttgttcagtgcattcttcaggttttcttcttcatagctctggcctcatcagaagtggccattctcacagtgatgtcttatgacaggtacgcagcaatctgtcaaccacttcattatgagactattatggatccccgtgcctgtaggcatgcagtgatagctgtgtggattgctgggggcctctctgggctcatgcatgctgccattaacttctccatacctctctgtgggaagagagtcattcaccaattcttctgtgatgttcctcagatgctgaaactagcctgttcttatgaattcattaatgagattgcactggctgcattcacaacgtctgcagcatttatctgtttgatctccattgtgctctcctacattcgcatcttctctacagtgctgagaatcccatcagctgagggccggaccaaggtcttctccacctgcctaccacacctatttgtagccaccttctttctttcagctgcaggctttgagtttctcagactgccttctgattcctcatcgactgtggaccttgtattctccgtattctatactgtgatacctccaacactcaatccagtcatttatagcttacggaatgattccatgaaggcagcactgaggaagatgctgtcaaaggaagagcttcctcagagaaaaatgtgcttaaaagccatgtttaaactctgaagaaccatacaaatgaaaggcattgttattatgtttcagattggaagagaggtgaatcttatttctacccagaatgctcttccaagctgtctattgtatatattcctctcaaatataattctttaaaatttaagatgttgtgctctaataattttagctttccttcctccctccaattcaagtgttattttaagtcatctttggaaaatttttctgaaatgaaggagaaagacaattagtttggagtctggcctgtataatttaaaacttgttattaacaaataaggttggagatagatgaagctaactgggttaatattatggtgcatatatggtatttccagtgggcctcctagttttctatccatattaagtattcatattaagttcttttactattattacagtggtgatttcaacaatttattcagcccctagtaagtatcaagtgctttatatatatacatttttttgactcaagaaaacaactcttctagctataacatattgtccccattttgccaataggaacaataaatttaggaaggattagttaattttcctgagatttctcaaataaatggtagttaagctctgattcaaattaatatttgtctgactcaaacaataaggtcatttatgttccttactgatggcaaatgcattattacccaaatgtgagtgtgtatgtttatgtgtgtgtgtgatgtgtataatctataaatataagcatatactactataatctattaataaaattgtcatcacccttgtgcatccctattactggaggtatttatattaattcctttacttttctgatctgtacaagagtttgacaaattggttttacagagttaggcaggggatgctccctagttccatgaaacagaatatagataaactgcaaatgaagagttccaacttatgaatgtgtgagataaggaggcacaaatcttgtgaatctgaatatctgattcaattttgtgtaatgctgcagatttcttcaagaaagactcataatttacaagagtacaaaactggactagtcccctcagttttgaagtaaatcaaagtgcatgttttaatgacaaagggaataagcaattgctcagtaatggggaatgtttttataggacttttttgaattaatggttataatatctacatatgcatataccttagtaagtttttttttctttaatctgccacatgagattttttcttttttttatatactttaagctctggggtacatgtgcagaacttgcaggtttgttacgtaggtatatacatgccatggtggtttgctgcacccatcaacctgtcaactacgttaggtatttctcctaatgctatccctcccttaccccctcacccccaaacaggccccagtgtgtgatgttcccctacctgtgtccatgtgttctcattgttcagctcctacttatgagtgagaacatgcaatgtttagttttatgttcttgtgttagtttgctgagaatgatggtttccagcttcatccatgtccctgcaaaggacatgaaatcatcttttttatggctgcatagtattccatagtattccatgggtgtatatgtgccaccttttctttatccagtgtattattgatgggcatttgggttggtttcaagtctttgctattgtgaacagtgccacaataaacatacgtgtgcatgtgtctttatagtagaatgatttataatcctttgggtatataccctgtaaagggattcctgggtcaaatggtatttttggttctagatccttgaggaatcgccacactgtttccacaatggttgaactagtttacagtcccaccaacagtgtaaaagtgttcctgtttctccacgtcctctctagcatctgttgtttcctgcctttttaatgatagccattctaactggcatgagatggtatctcattatggttttgattcacatttctctgataaccagtgatgatgagctttttttcatatgtttgttggccacataaatgtcttattttaaaaagtgtctgtcaggccggggcattggctcatgcctgtaatcccagcattttagggggccgcagcaggcagatcacgaggtcaggagattgagaccatcctggctaacatggtgaaactccatctcaactaaaaatacaaacacttagctgggcgtggtgccatgaacctgtaatcccggctactcaggaggctgaggcaggagaatcgcttgaacctggagaatcccaaaagtgtctgttcacatccttcgcccacattttgatggggttgtttgtttttttcttgtaaatttgtttaaattctttgtagattctggatattagccctttgtcagatggatagattacaaaaattttctcccattctgtaggttgcctattcactctgctgatgatttcttttcctgtgcagaagctctttagtttaatttgatcccatttgtcaattttggcttttgttgtcattgcttttgatgttttagtcatgaagtctctgcccatgcctaaatcctgaatggtattgcctaggttttcttcttgggtttttatggttttaggtcttacgtttaagtctttaatccatcttgagttaatttttgtataaggtataaggaaggagtccagtttcagttttctgcatatggctagccagttttctcaacagcatttattaaataggggattctttccccattgcttgtttttgtcaagtttgtcaaagatcagatggttgtagatgtgtggcattatttctgaggcctctgttctgttctgttggtctatatatctgttttggcaccagtaacatgctgttttggttactgtagctttgtagtatactttgaagtcaggtagcatgatgcttccagctttgttctttttgcttaggattatcttggctatgtgggctcttgtttggttccatatgaaatttaaagtagttttttcctattctgtgaagaaagtcaatggtaacttgatggggatagcattgaatctataaattactttgggcagtatggccatttttcatgatatttattcttcctacccatgaggatggaatgtttttccatttgtttgtgccctctctccttgagcagtggtttgtagttctccttgaagaggtccttcacatgccttgtaagttgtattcctgggtattttattctctttgtagcagttatgaatgggagttcactcatgatttggctctctgttttttttattattggtgtataggaatgcttgtggtttttgcacattgattttgtatcctgagactttgctgaaattgcttataagcttaaggagattttgggctgagacgatggggttttctaagtatagaatcatgtcatctgcaaacagagacaatttgaattcctctctttctatttgaataccttttatttttttctcttgcctgattgccctggccagaacttccaacattatgttgaataagagtggtgagagagggcatccttgtcttgtgacagttttctcagggaatgcttccaggttttgcccattcagtatgatattggctgtgagtttgtcatagatagcttttattattttgagatacattccatcaatatctagtttattgagagtttttagcatgaagggctgctgaattttgtcgaaggccttttctgcatctattgagataatcatgtggtttttgtcattggttctgtttatgtgatagattccatttattgatttgcatatttgaatcagctttgcatcccaggaatgaagctgacttgatcatggtagatgagctttttgatgtgctgctggattcggtttgccagtattttattgaggattttcacatcaatgttcatcagggatattggcctgaaattttctttttttgttgtgtctctgccaggttttggtatcaggttgatgctggcctcataaaatgagttatggaggattccctctttttctattgtttggaatattttcagaaggaatggtaccagctcctttttgtacttgcggtagaattcgtctgtgaatctgtctggttctgggcttttcttggttggtaggctattaactactacctccatttcagaacttgttattggtctattcaggcattagacttcttcctggtttagtcttggaagggtttatgtgtccaggcatttatccattttttctagattttctagtttatttgcatagagatgtttatagtattccctgatggtagtttctatttctgtgggatcagcagtgatatgccatttatcatttttatagtgtctattgatttttctctcttgtcttctttattagtctggctagcagtctactttgttaattatttcaaaaaaaccagctcctggattcattgattttttgaatttttttgtgtgtgtctctatctccttcatttctgctctgatcttagttatttcttgtcttctgctagcttttgaatttgttttctcttgcttctctagttgttttaattgcgatattagagtgtcgattttagatctttcctgctttctcctgtgggcatttagtgctataaatttccctttaaacactgccttagctgtactcctgcagctagctcagtctctgcgcaaacagccgcccagttttgtgcttgaaacccaggaccccagtagcgtaggcacccaagggaatctgctgttctgtggtttgcgaaatccatgggaaaagcgtagtatctgggctggagtgcactgttcctcatggctcagtccctcatggcttcccttggctaggggagggagttgtctgaccccttgcgcttcccgggtgaggcgatgccccaccctgcttcggctagccctccctgggctgcacccactgtctaaccagtccctgtgagattagtcgggtatctcagttagaaatgcagaaatcatctggcttctgcattgatctcagtgggagctgcagaccgaagctgtttctattccaccatctttccagccacccacactgatttctaaagtagttgttccatattatattccctagataatcaagaattgttataaagggctgggcgtggtagctcacgcctgtaatcccagcactttgggaggccgaggtggacggatgacgaggtcaggagatcaagaccatcttggctaccttgtcaggtgttttgaaaaacttttagctttttaaacacattcatggtgatatatatcgatgagtttattttgtattgccctgttcaacaaggttgaacatcttttcatggacttattagttatttgtgtgtcttcatttgtgaagtttttgctcagacacttggcccatttttaaaacaagttgttaatctttctattatgaagacatttacatatgtgtgtatatatgtatatatactggataaaaatcttttgtcagatacacgtattacagatgttttttctaatctcctgtgattgtcttttttttccatcaggttcttttggagagtaaaactttaaaaattttgatgtagttcaatctatcaactttgtgttttataattcatgtttggtgtcctatcttccaaaaataccttctttaaaattacaaagttttttttcttttgagacagggtctcactctgtcacccaggctggagtgcagtggtgcaatcttggctcactgcaacctccgcctcctggttcaagcaattctcgtgcctcagactctcaagtagctgagattacaagtgtgtgctgctatgctggctcattttctttctttctgtcttttttgtttgtttgtttgtatttttaatagagatgggatttcagtatgttggccaggctggttttgaactcctcacctcaaatgatccacctgccttggcctcctaatatgctgggattacaggcatgagccaccgcgcccggcctaaaattataaaggtatttttctatgtgaccatttagaaaatgaatagttttagcttctatattaattaagtctgtgatccttattgagttaatttttgagtgtagtataaagtgagtgttaatgatcattctttttctatacagatatatagtttttagtgtgatttattgaaaagacattattttcccccattgatttgccttagcaccttgtcaatatatgggcttactattctttttcattgatctatgtgtttatttttaactaataccataccatactgatttcagcaactttataacgatttttttttgagacggagtcttgctctgtcgcccaggctggagtgcagtggcaccatctcggctcactgcaagctccgcctcctgggttcacgccattctcctgcctcagcctcctaagtagctgggactataggcgcccaccaccatgcctggctaatttttttgtatttttagtagagacggggtttcaccgtggtagccaggatggtctcgatctcctgacctcgtgatccgcccacctcggcctcccaaagtgctgggattacaggcatgagccaccacgccgtgccctttataacaattcttgaagtcaggtagtttaatgcctctaatcttttgattttctaggctttgattttccaagtcttctgcatttccatatacactttagaattagcttgttaattcgtactaaaaagaagcatgctggcatttttattaggattgcatcaaatctatagatcatttctgagaaaatagaagtcttaatattgagtcatttaattcataaacacaacatagcttcccattttttaggtctttaatttctttcagtaacgttacatggctttcagtgaggcagtcttgttcctttattaaatttattactaattattcacattttaagttttgaatacaaaaattacacttcatgctccttaaattgtttcaaatgttgtagaaataacattaaaataagaatttcctctttaatagtgattcctagaggttatcactattttaattttgatatatatatatagacaaaattgcatatattatttcttttttccttttattatgtggttggatctcaagtgcagaaggttgagttcattacatttatcagttcatggcaccctgtcctcattaatatgtgcacgatctctctcatcttactttatttaaaacatttctttcctgtctgtttctactaccattccccctaaggaaaacaattattataagtttcatgtgtaacattttatgggctcttaatttctattagtattgttgttttaggatattttattctataaaatagtattacattataatcttattcagtttcttactttttttcactcagcacactacttttaagagctatcacgttacaatgtctacatctagcccactttttctaaaaactgcattttttttgatgttgtacatcctcaaccttcgcaaatctgctctcccgttgatggacatctgggttgcttctaattccccattaccataaattatgccaaacaactgttgttatggacctgtgtaaggatttatttaggatatatacctggaagcaaaattgctcaggtccaatatatgagagacttaatttgaatttttatacccagaatgtgctccagaatgcttccatgaggctacactcctaccagcggggcagacgtgttcctgtcatttcctcacctgtcccaattcttggcactaccctgctttctaatacttactactcaaatagaatacaatgttacctcacttttaaactttggagaaattttaaacctgtaaaaaatttgtaaaaacaatacagaggcttctctttttatccctcaccttgtttccctaatgttactatcttaacaaaatcataacacttctctctttataaaatagcctaaatagcttgaggtgtttttttatttttgttttttcgcttttaactttttggaacactttttgctcatatctctcgatctgctttcttatgcctgtgctagcgtataataaaactataataataataatgacatgtaataagtactacttatgccaaggattattctaggcttcaaaggtattattgtgttcaacatttacaataaatcttgtgaggcaaataatattgatattcctattttaaagataaggaaattaaggcacaggtcactaatcaacttatctacagtcactagcaaactactagctaacctgggactcaaactcaaggcagtttggcccccaagttttcattctttaccactatggtattttaaggaaaaattcgatattattttatgaatatagttttgcttctctttttttcagttgcaaaagacctaacgcatctgatatatcaaaatatatcagtcaaccattatgcagaaaagggttaacttttcatgtctgtgttgcagaaccctgtatattcccaagaaaggcctatattcaggactggcccttggcaggctcctggaagaggagctctaagttctttgaatatcctgcctaataaaatgttttttttaaaataatttgttttattgggtcacaatataaatttgatcagatagattatgctaacaaggtgatttatggtgcctatttttgctctggtgggctggggtctgagtagctgaggtcagttacacaggtgccgtatgcctacctgactgatcccccataaaaaccttctacatcaaacttgagtgaacttcctggttggcattattctgcatgtgttatcgtaccattgatggcacaattaagcacatcaatgtaactcactggaagaaaacacctggaagcttattcctggtttctcctagactcccggcacctcatgcactttttccctttgttcatttttaatatgataacttttcaatactaacagggacacaaatatgtacataacacattatgccatgtcttatatctttcttgagttgacgttctatgagatatattatcacatcaacacatgagttaaaattgtcctattatccatacctttcaatgctgtccatgttgttaaattatagcagctttctattttgatttataaatggacaggaatatatcagtaagacactaccagagtagtgcagtgaatatgcatgcattcttacatgtttacagagagagataggaaaataaaaggaaaggaatgggatggaaagaaaaggaaagaaataaataaatgaaagaaaagaaaatgaaagaataagaaaggaaagggaaggaatgccagcctttccctaaagacacatgacacaacttgagaccaaaagtcatagcattataaacagaatccctacgtttataactctttctgtttgatttttaccctcagaaggaagattacaaaaaacaatgcaactgaaattcatacttcataataatggttaaagcaataaccattaatagttcataagatttgagtccaataacttttaaaggcataattctttatgagcgtattttatttccctttatgcgcagctctaggctccttttcctacttccctgtttctaaaaggtatccactatacatttctgaaaaattatgtttttgcctttgacatctaaagcttcctgatataatgtgaaatcattcttcaaagtaggtttagcaatttacacccttaccaaccttgtatatgagctctcagagctttacatacttatccaacgagttactactctaaggatactgacagatacagcacactctacttttaatttgctttttctatcttattagacatttttgtttgtgtgtttactaggcatttggatttgtttgcagacttttgctcattttcattttggccattttctttttcttatttttaagggaattatgtgtctctttagaatactaaactgtgccacttaatagaagtggcagatatccctttcccttctgtagcctgatttttcattcattctgtggtttcctttgatgtgaagatgctctaattttagattgcagaattattaaaataagtctttctctctatgctaaagtcttttttagttcttttgttaaggaatgttttccactcccaaggacataaagataatcactttataggtactttaaaaagttttaaagttttgactttaatatttcaatctttaatccacctgaaactcatttttagatacactcatagtgagaaatatttcaatctatctttcttttcttaatgtggaaaaccaattgccccagtgccatttactgacttgcaatgtgtgtgtgtgtgtgtatgtatatatatatatatacatacacacacagatctctttggtgtcctctctttttgtccactcatctacctgtctgttcctgtgctaacactgtactgtcttatttcctatacattgtaaatcttgctattagaacaaatctctgaattttattcctgttttttttacttttttttgttatcttgcactcttccctctttgcataaatgtgagaattggtgcaataaatttttttataaattaaaagtatcttttaattaaaatttcattgactctatatgttagcaaaaaaataaagttactaaagataactcctcaaccattatcaaggtaaatatccatgtttatttagatcttctctaatgtatttcagtaaagttttataatattctgtgtaaagcttttctatgttctattagatttacatctggacattattactttggtagttatcaaaattatgttttccaaactacattttactctttgttgctggtatatagaaatataccaatttgatacctgggccaagggatttgctaaattatctcatttttctaatgttttatctgcagattcttagggatttttttttttttcttgagacggagtctcgctctgtggcccaggctggagtgcagtggcgcgatctcagctcactgcaagctccacgtcccgggttcacgccattctcctgcctcagcctccggagtagctgggaccacaggcgcctgccaccacgcccggctaatttttttgtatttttagtagagacgaggtttcactgtgttagccaggatggtctcgatctcctgacctcgtaatccacccgcctcggcctcccaaagtgctgggattacaggcatgagccaccgcgcccggccagggatttttttaagtagggaaatatagctcctataattaaggaaagtttttaaacttccattctagttcctatgaattttctttatcttaatgcaccagctaaaacaatcaaaacagtgtggaattaaagtgataacaagtggcagtcatgtcttgttctcactgagtacatgttttgacctaggttttagatggacaactgtttcatttatctatttttgtataaggagacatcccaaaacagtgacttcaaacaataactatttaacttatttactttagcagagcttggtaaagacagcttgccactgttccaataaagttagtattaggttttacctagaagtctagctagagctgttggctggtcctccatatggttctccatatgacctttctacatggctaggttgggctcctcacaaaatgatggctaggttccaaggataatctgaagaaccggtgtttgaagaatataagccacaggtacaaccatttatcaagcctctgcttagatctgtcacattggtcaaacttatcacatggccaactgtggagtaagtcattgtgaaacaaacgtgagtactgggggcatggttccttgagcccactaaagtactgatctaccccaggagcctttattaaattgacaaagtcccttcttatttcaggtctgctaaacttttcatcataaatatatgctgacttgtatgcaatgtttctttttcctatgtctattaagaccatcatacagttttaattcttttattcatcatttattcatgtgaatttattggaactccaactgaaaatccagtagtgatgaattagacaaagttttcatattcatgaagtgcaatctatagtggtagagaaaccactaacaaataaacatgtaagcatgaaccgggttagatggcaacacacattacagagctaaagaaagcaaggcaagtgacatagtgcaggaaacaaactatttcatattgtaaagttttcactaatagcaccacatgtaaaaataaagcttaaatacagttagctaattgagtatctgaggaaaaacattccaagcagagaaaccaatgcaaagtccagagataggagcattcttagaatgtataattaatagcaaggaagccagtatattttttaaattgttcttcatcattactaaattatattcactattttttcaaacctattggcataacgtttcataatttattcttttatcttatcttatttttgtggttacctgaagttacatttcctttcaatccctaatattattaatttgtgcattatcagctattattcttaaaagattttgccagaaatttgacatttaatatctttccctctattgttcttaatttcaataactcttgctcttatcgtaacactgtatcatttcttccacttattttgaaatttttccatttgtatttgtaatttttcacattagagacttagctagttaacatttatttttttcttttttaatgtaagtatttatggctaaaattatcattaaaatcagtttagcatatttgtcataaatttggtgatgtttatatgtgatgtgattcttgatacttgattctatgccatagttctagttagttatcatagctttgtaagttttgatatccagtggtgtgacttctccaacttggtttttcttcatgtcattgtggcttttggttgcatgcatttagatattaatagaatcattttgtgaatttccataaagccaaaaacctgcttgcattttactgagaatcacaatgaatttaaacataaatttgggaagaattgacttcttagcaatattgaaacttccactttataaaaatgtaatattccttgatttatttgtctatttaaaatttttttagtaatcgtttgtagttttcaatgtagagattttgccaatatttaattaaatttgttcctaaatattgggaggcttttgatgctactaaaattttatggcctttgtattttatttagtttactatttaattctaatagtttaggtatatttcctttccagatctttatgtacccaaccacatcatctattttcaaattttataccttctttgtcattttcctggctctattgggctactgagaagaaatattgacagtagtcattcttatcttatttcttaacctatagtggaaatttaaagtatttcatcaagtatgatatatactgtagcttttatgtagagtcttttcttcagatcaaacattcccttttcatctgagtatgctcagtaattcagcgattttatctttagtaaatgttaaattttttcaaatgttttgctgtatctattggaatggttaaagttatttttcgtctgtgtgtatgtctgtgtgtgtgtgtgtataatgtcttcgtttaattttgttatcaagttgatactggcctcataagacaaattggaagtgtttcttcttccctatttcctggacaattttgtgtaataaaattttatctatctatttatttatttatttttaaacattttattttgacataatttcaaggttacatagagattatcagaatagaacaaataatactcatatatcctttacccagattcacaaattattaacatttttgccctagttgctttatcatttactcttttaataaacatttttttaaccttttgaacaatgtgtatttcctaagaacagacattctcttgcataactagtaaaatgaccaataataaaaaaataccattcatacaataatattatgtcatccagagtcaatattcaaatttaatccattatccaaatgatatcctatattgattttatttcctagtctaaaattcaactcaggaataaaaatttcacttagtggtcatgtcctttgagggtcttttaatctggattagctcctcagtcttttctcttataacgttggcagcttggagttcctgttattttgtagaatgtcactcagtttgggtctgtctgatatttcctctgattagatctaggtcataaatgtcatataggaaaatagacatgagattgtcttctcagcacattacatcggaaggcacatgttgatctgtcccattactggtgatattagctataatcagttggctaagatggttctgccaggtttctccattataaatttactattttccccttagtaatttataagtaatttgtggagaggtactttgacaatacataaatattctttattccccaaactttgacctactcatttaagtattcactgataatttttgcttaaatttttgcttataatttttattataattgtagcaaaatggtgattttctaagtctaccatctctttcacatttattagttgatgtgctacttaaagatattaaatccccttctattaaacaatttttttaatttattttttatttcaataggtttttggggaacagatggtgtttggttacatgaataaggtctttagtggtgatttttgagattttggtaaactcatcacccaagcagtgtacactgtacccaatatgtagtcttttatccctcaccctgctcccaccctttcccctgagtcctcaaaatccattctgtcattcttaggcctttgcatcctcatagcttagctcccacttatgaatgagaacatgtgatgtttggttttccattcctgagttactgcacttagaataatggtctccaattccatctcagttgctgtgaatgccattattttgttccttttaatggctgaatagtactccatggtgtatacgtatacatctcccatatgttctttatccactcattgattgatgggcatttggactggttacatatttttgcagttgcaaattgtgctgctataaacatgtgtgtgcaaggaatctttttcatataatgacttcttttcctctggatagatacctagtagtgggattgctggatcaactggtagttctacctttagttctttaaggaatctccacattgttttccataatggttatactagtttacattcccaccaacagtgtaaaagtgttcccttttcaccacatccacgccaacatctattattttttgaatttttgattatggccattcttgcaagagtaacgtggtatcacactgtggttttgatttacatttccctgatcattagtgatgttgagcatttttccatatgcttgtcggccatttgtatatcttcttttgagagttgtctattcctgtccttagcccaatttttgataggattctttgttttcttcttgctgatttgtttgggttcttcgtagattctggatattagtcctttgtcagatgtatagattgtgaatattttctcccactctgtaagttgtctgttaactctgctgattatttcatttgctgtgcagaagctttttagtcctatctatttatccttgtttttgttgcatttgcttttgggttcttggtcatgaaatcgttgcctaagccaatatctagaagggtttttctgatgtcatgagtttttatggtttcaggtcttagatttaagtatttgactcattttcagttgatttttgtataaggtgagagatgatgatccagtttcattctcctatatgtggcttgccaattatcccagcaccatttgttgaacagggtgtcctttccccacttcctgtttttctttgctttgtcaaagatcagttggctgttaagtatttggttttatttttgggttatttattctgttccattagtctatgtgcctatttttagaccagtactgtgctgttttggtgactatggccttacagtatagtttgaagttggataatgtgatgcctccagatttgttctgtttgctgagtcttgctttgaatatgcaggctctttttaggttccatatcaattttaaaattgtttttctaattctgtgaagaatggtgggggtattttgatgggaattgcattgaatctgtagattgcttttggcagtatggtcattttcaaaatattgattctacccatccatgagcataggatgtgttcccatttgtttgtcttgtctatgatttctttgtaataaaattttaaacaaaacattaatggacataatatgtagcaccattaagtgtccatttttgagtcactctgctaagcactttacagaattatttattcaatatgctcattttacagatgcagaaagattaagcgactaaagtcacctcacaaaggataaatggtagcactagaattaaacccaagcaatctgactgtagttgttatgtacttatatatgatacagtatgccttctattattaagtataaaaaataacaaatgataaattcctcatgttggctagactgagggagaacaatactggaagcaatataatattttacaataattttagagaggaatttatcaatatttaaatgcatacagttttagaaataaacttaaactgaataatcttatattctttaattttaaggaaaaaaccaactgcagaaaatgcaatatttataaatacgcttatgctatcacttagttgttatgttattcataattaagaaaaaatattaatagagctatttaacctggtttgttgaatgtgataatgattacagaaaacattgactaatgctgcttataataatgaaaaactggaaaagtgactggtatacaataggcaatcaataaatatttgttaaataaataaagaaaatttttctgcaaattgtgaattgttatctgagcagaatgctatgtagcctttaaaaaaataatgtatatccacatagcttcagaggaatttttgtaacaattatattattattaaaaatactaaaatgtgtatacaagatggtgagacaactccaaaatataaaacaacattatggacttacctttatttctaagtacttacaaagttgttgcaaaaattttaatatacatattaatggatttagctatcatatgagatttgcagatattgttgctagatttgtttttgaatatttcagtagatatttctgattgttagagatcataatttatgaccaaaatagctgttctaaatctaattttgacacaaaggctcaaatttgtagcataaaaaaatgttaagtactgacttctagttttccaggaggtctggcattagagatccattaatttttaaagggttaaatgttcctgtttcttttttggaaatatgtgatttagagtgcattgattctccaagtttggctcttggactagcagcagcagtacctgggtgcttgttaggcattcaaattcatgagtgccattccagacctactgaatcagaattcatgagtttgaggcttagacttaggtccttatgttttaacaagatcttcaggcaactcaaatgtctgctaaaatttgagaaccaatgctaaggatgacaaaaccccataacttactaaactatttcccttctatatgaaaattttaagggctccaaattccaggtgttagaagagtacgaaattgaaatatttttatcatatagtccagacttccagtatgaaagacgtaaaataaaaaaagtcctgaatcttctaaggaaacaatatgtttaaaagtatctgagagtagatttgagagttttaaaaaaaactgtttttaaagacgtaaagtagagctatgagctcaccaaagtccactgaagttcgccaaagagctgagttacttcagctctcatgagaccagtaatttttgcttgacgaaggtatttggcaagaaaataattccacaataacacatttaaagatacctagaacattgaaaaaaattctcaaattaagataatatagcttaattcccaagaacttatttcatctcttttgttactaatctagaaggtcaggagtgtggtaaaggcagtgtctgataaggttatgagcttccaaagagtttctacatttttagtgcagacactctccctttgggggcaaagtacggtttctcccatccctattaaaaagaaaacagttaaactaagttatcagaatgagatattttgactcttaacaatttacactcaaggctttatgctgagttgtcttgttctaatcaagcatgaaggtgtcaagcacaaagcacgtggcaaacgaaagacactcccgcctcattctgaaaacaaatactgataaccaaccccaccctcttaccatttcaggccaacccatcttatgatactgggaccaacttgaaataatttagaggtatatttaggtttccctctcccttacttcagtaaaagatcattttagaataactttattcctttcctaagggaaagacaaaaaagtttccatcccgtcagaacatacggggagagaaaacacacaggcccagaggtgggaaggtgtgtgacagtccataacccattacacaacgatgcaaccaaaggctaaaccatgagttgaatatagttttaatattaaaaataggaactagttatcatccaaatgaaccactggaaaaaatattaccattactttaaaaaatacattccaatattggaaataatctgaaaacactttccagtagtaacaatcctccttaatatgagggacaaaaaaaaagaccaggctttgaccaagtccttagagcatatttccatttcatgatttatattcaagaaccaagcaacaagctggacagctgcctctgtaacactgtgtccaatagtggtgtcccagatagtttaagtgccactcgtcattagatgttatacttcagcaatacttccaattttaagtctgtactttaagagggacccacaggaactcagcaccaggcagagcagtgtaagactggaaaagaagactgaacttttgattggtcactcacatgttttttagcgagatacagaattacatttacactctttccttgcatttcttctatattaatgatccctcttgcaggaggtgtaggagaaagaatgctgcgtcagtacaagaacaagactttttggtcaaaagttgataccgtttaaattccctctcccagcgcttcatgcaaaaaaaaaaaaaggttacttcctgaattaaggtttgtatttagtaaccaacattgactggacagaacatacgtgacttggattccaaataaatgagattgctcttttttgggtttgtactgtgcagctcttgccacagttgttgaagagttagggctgtgtctgatcaggaggcatctgtaggattttgatctccaaggaattgtgggtgagtcacatacacctggtgtattacaggtgggcacctgtaatcccagctacttgggagactgagacagggagaatctcttgaacccgggaggcggaggttgcactgagccaagatcatgccattgcattccagcctgggtgacacagtgagactctgtcttgggaaaaaaaatagaagtgggcagagtcaaaaaagcaacttcaaataattaatccctttgtccatatgagttaaatacaaacgtgtatattttaggtttttaaaaatcaatgcaatatgggaatcaattttttaaaaattattttttgcttttttttctcctcccagatgccttctgattgacctagtacactgggttaaaagggaattcaaaaacattaaaaaaaagttcactggttttgattcatctcagtcttttggcctggagattaggccaaacatcaagcatgttgggagggcaacaatttaaagcaacattattgactgtaaagcatttgccaggaatttacagtacaaaatgacagataacaattattgtcataacacaagagaatggcaagcagctttgtgtggtatgaaagttaaacagttctcaggggttgtccattcctgcaaaagtttatgtatcaaggtgggcagaaggcaatacatttacacactacagatgatccatagaaaattaagctccagaactcctaacatcaccaaagctggtactggctaatactatgaaatgcgaatctgtgctttatgcatgtactgctcaacaatactaccactcaacagaatccccacactgcaaggtagatgcatggtagattaatctttgccctcttttggagagcttgaaaaattccttaaacttttagaaagggtgaagaagcaaaataaaagagcttctcaaaaaaaaaaaatcttgaattatcaatttttgacgcttcgttgctctctctggtaagcctcctccaggggtactagatgagacagcgtgggagcaaacaggacatcccagatttctgtgtccctttcctaaccaagggtaccatagaaacctgctctctacagcaagaggccaaagtgctttctagaatttagtgctgagtaaactgagccccttcatctttagctgctcccataatcactctaatccccttaatcccatcaacctttatcatatatatgtatatatacatatacacttatttacaaggttgataaaagtatacacactcaattttcaacgcaacacactctgccacaaaagaaatagggtcaaggttctgacatgtctacaagtcaagtgccatattgttactggagacgtatgtaaaccagtctttagtgtttgctatagagcacaaaggcttgtcataaggctcctccaatgatagactgcttttcctttgggagcattgatgttttatctactcagaccagaataaatttttacttggaattattattattttgagacggagtcttgctctgttgcccaggctggagtgcaatggcacgatctcagttcaccgcaatttccgcctcccaggttcaagcaattctcttgccccagcctcccaagtagctgggattacaggcacctgccaccacgcctggctaatttttttgtattcttagtaaagacagggtttcactgtgttggtcaggctggtctcaagatcctgacctcagataatctatctgcctcggcctcccaaagtgctgggattacaggcgtgagccaccatgccctgttgggatttttttaatacatgtgtttacagtgtggatgaactgcagctgcatatcaactcctccaatataaagaaaaagaaaatggtatttaactgactaataagtttcatctaccagctctgggcttcagtattgggtagaaagaaaacagagacttcaccctaaaaccaaaattaaaagacaaaaattttttaaagaataaaggaaagaaagagtactactgttgattctttggtctgtgtctaaaagatgatattctgaataactcagagcatacagcacttcacacaaatgagtaataagctcctcaggcttaaaaaaaaaatggatgactagggagaagttgaaatgtcctcgagagtcagatgttggagaattttgaaataatagacaagcttttgtgttcattaagattcttctctttttagggtttctccccttctttcttttcctttcctgtcccctttccccagaaaacatttttttaaaaccagcagttagtgcaactaatgttcacttagcatacagtgcaaacagatggaacaaaaaaaaaggaatattccttcttttcagcttttttctcttcaccagttaaaaaaggaaaaaaaaaattctgaactcttttaagtcttcatagttctgaaataaaagatgaaaaactcacaaagagaagagcactcctctctaaaaaatggtatgtcatagatccaaacaaggcttccacagtttgtcaaagagtgcttattaaggcttctcattttctacagccttgctgtggaattctgccacatgcaggctcttgtcaatgttgcttggaataggttttatttcttttcccagctgctcctcaatacctttcaggttgaagtgatcgccatatgtgatcaagttgatggctaagccaaaatggccaaagtgacctggtcttccaatatgacggagataggtctcttctagctttgaaaagtcaaagtttattaccacattcacagcttgtatatcaatacctcaagtaaacagatcagtgcaaatgagaataagccatttcagaaataataaaatacacaattttgatgttcctgcctcattttagcatgaatgtagaaacaaaaataacccagttgagaaattttggctggccattcaactcgctgagagcagttaaagaaaatgatcatctggtttagctgaagcctggagaaaagtgtggtgaggccgtgtactttttggtgctcagttacatatgcgtagtactgggttatgtccttcagagttagtttttccatcaggttagtctcagggtttctgcaaatgggaattcatgaacttctgtatactaagagggaaagtagcagaatgtagtaaaatctgcctgtcttcaggtagcatgagaataatatcttccattaactgcccaaaatcctgggacagaaacttatctgcctcatccaatactatcacctggacatgactgacctttgctactcctttcttaataagattcaggattctcccaggggcagcaatcaccatgtgcactgtatcatccagcctcagtacgtcatctcctgaattggttcctcctgtggtcatcaccactttgactcctcccatgtgtttgctgacctggatgcaaatttgactgacctgtagagcaggtcctcctgtgggaacaatcactattgtttgtatagtgtccttcttcaggtctagccttttaagtaggggaatgtcatgggcactgctcttgcctgttccattttttgctctagctaagatatccctaccagataaagcaatgggaatgctctcttcttggaaaggagatggctttttccatcccatttcaaaaattctcatcagtaactgccgtttcaaacagtaatcttcaaattaatatcctcttgtagaggtcacatccaacattttgattcttagatcctttggaaggagttttaaagtcttcttccaattatcaccaggcttaatagtggtggtcatactctgcgcttgtggttgagtgctattattgtgttggtgtttttcagctggttcgtctgttgctgtgtctgtgtggcctctcctctagggccaccactgggtttcaggggacccctcagctgaccattttgactggacagacccattataacagcgttctctgttctggttgtgctcatgctgtgttaattgcaaaggtgtctttcaaacttcaaaacgtttgaaagtcaatagagaaactgtaataatagtttattaggctgtccaaagtgaagagataaatataggtcttgctcaataattaagttcttttattataatgcaggcaagcacccgtaagtctctgaatggtaagcagcagtaacttactttcttgtactgtatcaacttttaatttttaaaaggccctcttaccagcttcaattatagctgaattcacttacttcaatcactgaggccactcctgtgctggacactcttggtcctttattgttgactggaaactcccaaaatattgccactctttcctctttggatacctcaacctgcacctccagatataatttctaagatcaattactgagacacacaaagaaatctggtgagattttacgtggtttagaataaagtccaaagaggctgtttgatatagtggtttttcctacttctttctagaactcacagatgaaaaagaaaaatgcagaaatatgagactcattaccaagtgactcgtcaacactcatatactgatgtgtattttgttttgtttgtttaaagacagtcttgctatgttgcccaggctggagtgccgtggtgattcacaggtgtgatcatggttcactacagcctcaggctcctgggctcatcctcccacctcagcatactgaggagctaggactgctggcatgtgccatcatacccagttaaattatatgtattttaattagggtagaacccttagttatttccaaagctatttcttatactgtatttaaaacttaaacttaattctaaagaaaagataatgaataaatgaatcccttttttttgttgagatggagtctcactctgtcaccagcctagagtgcagtggtgcaatctcagctcactgcagcctctgcctcccgggttcaagtgattctcctgcctcagcctcctgagtagctgggactacaggaccgcgcaccaccacacccagctaatttttgaatttttagtagagatgtgtttcaccatgttggccaggatggtctctatctcctgaccttgtgatctgtctgcctcagcctcccaacatgctgggattacaggcgtgagccaccgcacccggccataacttatttttaatatctcttgactgcagctgctaccacaatttgcatcttcaaaatggttatggaggttcaagatggctgactggaagcagctagagtatgctactctcaaagagaggaaagaaagtggcaagtaaatagtagctcttcaggtgaattctctaagagagcatgtcaagattcaccaaggaagtgagggggctcacgaagacctcagcacattttatcaggagcttctcctagccacacccatcagggctggtgcctgcacctgtcattgagatattcgtgggaaagccacgtttccagctctgcccaggtatatcccaccaccctcacaaattaggaagctcagaacactggacacccaccccactgtccagtccttcacctgaaacaacagagagcacctcacagtaaataaaggtcagctcccctcccacctacttgtgtggcagctgactcttacctgcaaatgccatatcctgagtcataggtcaaaccacacagcccaacacaaaacctgctgacagaagtgcataggactatagaaacaaccccaaagaccctacctagtacaacactctccagatgagaaggaaccagcacaagaattctgccaccattaaaaatctgaatggaatgacatcatcaaaggctgactctaggtttccagcaatggttcttaaccaaaatggaggcaggaggatgacagaggaggaattcaaagtatggattacagggaaactcaatgagatccaaaataaggttaaaaatcagtacaaagaaacctgtaaagcaatccaggaaataaaagaagatgcaaacatcttaaaaagaaatcattcagagcaatgaaaactataaaactcacttaaggaatttcaaaatacaattgaatgctttcccaatagactagaccaaacagaagaaagaatttcagagtttgaagattggtctttcaaacttacccagtcagacaaaaacaaagaaaaaagaaatttaaaaattcttaaaattcttggcacaaagtctccaagacacatgggttgtgtaaaatggcaaaacctgtgaatgactggcattaatgagagagaaaaagaaaaagtaaaaaacatggaaaacatatttgagggaataatttgagaaattttcctttatcttgctagggaagtagacatacagatataataaatccagagaagacctgccagatcctatataaaataaacatcaccaaggtatatagtgaccagaatgcccaaggtcaatgctaaagaaaaaactttaaaggcagctagaaaaaaaggttagatcccatacaaagggaatcccatcaggctaacagcaaacagaggaaacattataaacttattgggggccttctcagcagaaatcttatgggggacttacattcagcattttttaaggaagagactccaaccaagaatttcatacaacaccaaaccaagcttcataagttaacaagaactaaaatatttttcagataagcaatagctaagggaagtcattaccactaaaccagccttacaagagatccataatggatttctaaacatggaaagaataataactgctactacaaaaacacacttaactacatagtccacagaccctatatggcaaccacacaatagaaactacaaagcaaccagctaacaactttacgatatgatcaaaatctcacatattaatattaaccttgaatgtgaatggtcttaacaccctacttcaaaggcacagagtggcaagttggataaaaaacaagactcacccatctgctgtcttcaagagacccatcttacacgtgatgacactgatagactcaaggtaaagggtaggagaaagatctatcacccaaacagaagacaaaaaagagcaggggttacaattattatttcagataaaatagactttaaaacaacagtagtcaaaaaaggataaagaagggctctatgcaatgataaagggtttgatccaaccacatggcttaactatcctgaatatatatgcaaataaaattggagcacctagattcataaaacaagtactgctagacctacaaaaatacttagccacaccatgggagtgggtgacttcaacatcccattgacagagttagatcatcaaggcagaaaactaacaaagaaatcctggagttaaattcgacatttgaccaattggacataatagacatctacagaacactccacccagcaaccataggatatacattcttctcatttgcatatggaacatatgctaagattgaccacatgcttggacatcaggcaagtctcaataaagttaaaaaattcaaaatcatacaaactatactttgggccatggtggaataaaaatacaaatcaataccggtaagttctctcaaaaccacaaaattacatggaaattaaataactttattctgagtaacttttgggtaaacaataaaattaaggcaaaaatttagaaaattatttaaaataaataaaaacagagatacaatattttattttttatttttacttttttatatacatattttattatactttaagttctagggtacatgtgcacaacgtgcaagtttgctacatatgtatacatgtgccatgttggtgtgctgcacccattaactcgtcatttacattaggtatatctcctaatgctatccctgcctcctccgcccaccccacgacaggccccggtgtgtgatgttccccttgctgtgtccaagtgttctcattgttcaattcccacctatgagtgagaacatgtggtgtttggtttttttgtccttgcaatagtttgctgagaatgatggtttccagcttcatccatgtccctacaaaggacatgaactcatcattttttatggctgcatagtattcctttgtatataaatgccacattttcttaatccagtctatcactgatggacatttgggttggttccaagtctttgctattgtgagtagtgctgctataaacatacgtgtgcatggagacacaatattttaaaatctctggaatacagctaaagcagtgttaggaaagcttacatcactaaatacctacatcaaaaaattagaaagatctcaaattaacaatctaacatcacacctagagaactagaaaaacaagaactagtcccaaagctagaagacaataaataaccaaaattcattagagaactgaatgaaattgagactcaaaaatacatgcaaagtaataaccgaaagctggttcttgtcaaccagatcaataggacaccagctaaattaacaacaaagaaagagaagatctaaataagtgcaatcagaaatggcaaaagtgaaataacaaccaatcccacggatatataaaaaatcctcagagactattatgaacaccactatgcacacaaactagaaactctagaggaaatgaataaattcctggaaggtcacaacaccccaagattgagccaggaagaaatcaaaaccctggagagatcaatatagagttctgaaattgaaaaacaaacctaccaaataaaaagggccctgaaacaggtggattcatagccaaattctaccagatgtacaaagaaaagctggtaccaatcctactgaaatattttttaaaaatggggaagaggactcctccctaactcattctacgaagccagcatcactctgataccaaaatctagtaaagacacaacaacaaaagagaaaattacagacaaatatccctgatgaacatagatgcaaaatttctcaataaaatactagcagatggaatccagcagcacatcaaaaagctaattcaccactatcatgcaggcttcactaccagtacgcaaggttggttcaacatatgcaaatcaataaacatgacttgccgcataaacaattaaaaacaaaaccatttaatcatctcaatgaatgcagaaaaaatgttttgataaaatccaacatcccttcatgaaaaaaatcctcaacatactaggcatggaagaaacatacctcaagataataagagcccactatgacaaacccacagccaacattatactgaattggcaaaagctggaagtgttacacttaagaactggaacaggccaaggatgccaactctcaccattcctattcaacatagtgctggaaatcctagtcagaacaatcaggcaagagaaagaaataaaaagcaacaaaataggaaaagaggaagtcaaattatctccttgctgacaatacgattctatacctagaaaaccttaatgactttgccaaaaggcttgtagagctgataaaaacttcagtaaagtttcaggatacaaaatcaatgtacaaatcagtagtatttctatataccaataacattgaagctgaatgccaaatcaataatacaatccgattcacaatagccacaaaaagaataaagtatgttggaatccacgtaaccaaagcagtgaatgatttctttgaggaaaactacaaaatactgaagaaagaaatcatagaggatacaaataaatggggaaaaaagcccatgctcatggattggaagaatttatattgttaaaatgaccatactctccaaagcaatctacacgttcaatgctattcctatcaaactaccaatattgtttttcacagaattagaaaaaatattctaaacttcatttgaaatcaagaaagagcccaaatagcaaaagcaatactaagcaaaaagaaaaatactggaggcatcatactacccaacttcaaactatattacaaggctacattaaccaaaacaacatgatagtggtacaaaaacagacacataggccaaatgggagtctcttagcaactactttactaatattaatttgcttatattttgaaaaagagtatggaccatgtcactaagctgttatgagttacataactggcatgtgaagttggttggtggagaggagagactgtgcttctatggaatacaacctcagactgcactctgatcctaatctctgtcatggccctatcaatcacgagccatctccgagactcattctggccagacatttaaaatacatttttcaatggaagtattcaaactacagtaaaataggagaatcaggtggaatagtggaaccaactgcttataaatttactgtacacataaaaatcatctcttcaaatcaccatgccacctcttactaaatgtgactaaaggtttccagaagctagggaaagttctttagcctttctgtggctttgtttcaccatatttaaaaagccccacacatgaagaattatgcagcccaaaatgtcaattgttcttctgttgagaaaccctgaactaggtgcactgtgacttaagaaaactactccaacgcaaagacagataaatgtgttcatataatttttaacttccaagtttagggatattacagccaacatggaagtaaggataagttgttggttaaagagaagttgttgatcattcattctatattagatgtaaagaaatgaaaaataaggagtgggaaaggctacccattcactctgcctattgaaatcaggcttccacctgtatctctgtaccagaacttttctggtcaggggcaataataacttccttgcatttagcaacagtttcatgagtggacctaatttttaacaatactttaaatatttgaacttgattatagactgaagtaagatagaagagtggttggaaatacagagaatggcattagatgaacttatctaatgctttatgtttcttctgtggaacagaaggtgagactgtctgccaagcatgaagggagtgtgggtaaattaatgaaggaaagatgaatgtttaaaacagttcctgaaggaaataggagatggcagtaaccataacaaataaagtaagagaaaagtaagattgctattaattttaaacaacatcagagtgtgtgagtgtggagttttctccagattttctgaaccgtatgtatagaaaatactggatgctgttttggagtattccctggagatgtggctagaggataaatgtgttatgaagttggaagtcccagaaataaattgcaaatttttttcctctggcttactgttctagccctttacagacatagaggtctggctctatagggacataagtacagttacaaggaactgaaagacttacggaaagtgggcagttaagaaactgaaagtatctttgaagccaaagaaatgaaaaagatgtagagaaaaaagacacatatcatatgattttacttgtattattacattagggaaaagaaaaaaactataaagatggaaacaaatttatggttaccagaagctggagtccgtgatgtgttgtttataaaaaggaatgggaggatttgggaggtgacagaattgttttatatcttgcctgtgtctatagttgcatgattatatgtgtttgcaaaaagtcaagtaattatatgctaaaaaagagaatgttaactgtctataaattatacatttataaaataaattggaatgagagaagtaatgggagaatggcaaagagcatactccaataccaaacaaaagactatgaaggtgggatatagtcttagagtagacatgtaggtaatcttcatgatgtgatcataacatctgcactacctttgtaactttcatattaactgttgcacttactacattgtattctaattatctggtgtatgtgtttctctctttataaggtgaatgatttgaaggtggggaattgagacttgacctgatacacaattgaatttttgatatctggattatgccacaatgtcttgtattaggttgatgatcaacaataattttaaaaagaataaaaaaggagtggaggtcaaggaggtctgaggttagtgtggggaggcaagataatctacctaatattgattgtggcagcatgatggtcagtgggaaggttgcatcatcaacatagatgcctgggtgatggccatatttgatactggagagaagaaactggtatgggcacccaatatgcagttaggaacatgcctggaaaataagcatatgagcaaaataagaagatgtagagaatttttgtggtaagaaaatgacctcaaagtgcaagatattttatatgaaagagaagaagtaacagtcagaaaaaaaataagaaacttagagaatacagaccttgatcctacccacctcctcaaactgtgagagaaggagcagctttgaattgaagaataagagaaatagcttttgggagaagaaccaaatgtcaatgacaacacagaaatatcaggagtaggtagtggtattggagagctttttcatagtagtgctagggttctaaggaattttattagtgagcaaagaattcaaaaagaaacattccaaaatgtaagaatgacagcatgggccgggcgcagtggctcacgcctgtaatcccagcactttgggaggccgaggcgggcggatcacgaggtcaggagatcgagaccatcccggctaaaacggtgaaaccccgtctctactaaaaatacaaaaaattagccgggcgtaatggcgggcgcctgtagtcccagctacctgggaggctgaggcaggagaatggtgtgaacccgggaggcggagcttgcagtgagccgagatggtgccactgcactccagcctgggcgacagagcgagactccgtctcaaaaaaaaaaaaaaaaagaatgacagcatgggataggaaaaggtgggatgacctaagttaaagaaaagaaattaacaatatgttgcttgaatttatttttctagcgatagaacttttgcaaatgaaaacacttcttcaccatgcacttatgtaccttttggtcctagagaagaaataatttattttcaaagatgtgctaaccttgtgggttaattgttatttaaataacaactatttactcatgagagagagtgacttgcatgacataaaaaatttcataattatttttgtaagtaagagaaacatacagtttcactttgctttacaaaacagtcttttgggtaacagtgtataaattacttatactccaaatcacggttgccacacacaacaataacattatttaaaacaacttttttgtaaatcattttgtaaaatggaaaaaaaagaacatgtttgcattaggtgcttcctgcagataataaaaacaaaatggaatttatttttccctcagatgtgtttgacatgtgataaaggtaattctcacataagaaatattgtagagtgcttacaaagaatatataaatcataagaataaatcaaacacaagtcactagaacttgtattgccatattaatataattattccaaaataaaagttaatctatagtttcctaaaaaagatgacctttgaaaaggacaaaagagaaatattacagctacgtgaactggcattttgaatgttgatatggtttggttctgtttccccacccacatcttacaactcgaattgtaatccccaagtgtcgagggacggaggtgattggatcatgggggtggtttcccccatgctgttctcatgatagtgagtgagttctcaagagctctgatggctttattagtgtttggaagttcctccttcactcttctctctcctgccaccatgtgaagaaggttcttgtttccccttcactttctgctataattgtaagtttcctgaggcatccccagccatgcagaactgtgagtcaattaagcctctttcttttataattacccactctcaggtagtattctttatagcaatgtgaaaacggactaatacaaatgtcttaccccaaattaagtttgattattttttctttttttaaaaaaacagctttattgggagtataatatacaaagaattgcacatacttaatatgtacaagttgatgagctttgacatatacaaatatccatgataccattaccacaatcaaggtaatagacgtatctatcaccttccaaagttccgttgcatccctttgctttttttttttgtttttttttttataagaacacaacatgagatttaccctcttagcaaattttgaagtgcacaatacctatagccactatgttgcacagtagagctcttattcatctagcataactgaaactgtatactcattggaaaacaatttccctatctccatttcccccatcccctacccttggcaataactttcattctctacttctagaggctaaatgttacaggtcctcacataagtggactcatggagtattagtctttctgagaggcttatttcactgagcatagtgctctccaggttcatccatgttgttgcaaatggaataaactttttatttttaaaggatgattttgcattttcaaactaaaaaattggaatacctctcactctatttgtttgaaaataggcaggatacataggtccacaatcatgctcactgtactcataaccccacctttttaccagctatctattgtcgtttgatttcaattaacagttagatttgagtgaggcttgaataggatgatcatgagaatggttctagcatgtgagtctgagtagctatcaaggtttccaattaccttgaagcaggacttaactctcggtcatatcacttttgtgtacgtatataaaaacacaaatacataaataaaaatcaatgagacttatttcatggagtttttttttttttttttttgctgtagaatagtaatatatttgtttatgtcatgaagtacacaccaggagattggtaatggaaaacaactggtaaattagatattaaaattttgatatatcatttcaaaaccaaaccagattaaaatttaaaaagcatataattttcatttgaattaaatgacattatctgcaattttcaacaagataaaagtatacatcctctgcccaactagtaacatgagaatatccttgcataatgtacctctgccccatataatattttacttagttatgtatgcagtctagtatcattgagcagatgatactttcatgcattttagaaaataaaacatatgaaagctatacgatggaatatttttctcatattgatgtggcaaacatttatttaccacatcaattcatttcctccaaataaaaactgatactagtttcttgatacagaaaaagcagaggacttggatagagggaataacagtcactaatttgactgtacctgtattagtccattctcacactgctatgaagaaaaataccccaggctggataatttataaagaaaagaggtctaatgaacgcatggttctgcattgctggagaggcctcaggaaacttacaatcgtggcagaaggtgagggagaagcaaagacacgtcttacagggtggcaggcaagagagcttgtgcaagtgtagaaaaaactaccagtcataaaaacatcagatcttgtgagaatccactcactgtcatgagaacagaatggggaaaccacccccataatccaatcacttcccaccaggtctcttccacaacacctggggattacaattcaatgtggatttgagtggggacacaaagcctaacaatattagtaccaaatgcaatcctagatgaactcctagagcaggaaattttaaatataagttttgaatggaaagacagctgtagaggaagaatatgatttcttaaagaactattataagtgtcctgttcttgtctaaagtaattcttccctaacacagaatctcacttcctataggttcttaagcatgatgatacatgttttgtggctgaaataacctaatgaaatattccaatacacaattttattacatatatatgttactaatttgtacatagctttataagtatatatacaagtatacataagtttataatatgcatctagcttttcaaaactacatgaaaagaatctatgaaagatatagtaacaaaaatcaaacataaggctatgtatacaacagtaaattgaattcatagatgacaaatttatactataattcacaaatagcaataaatagtagaaaagcatgatctcatattataaaactgaacaaaattaattttaaatgctacaacataaatatcaagtggaaaaaagcttccgttttacaagatgaggcacattctttacagttgtatgttacttggattagtattttaatttgtaatttaaatagaactttcaatatggtagactactgtaatgatgatccagtatatcagaatagtgaattaaataaaacaagagaataagtgaatgggtggctatgtgaatatatactgtacatacatagtccccagggtgaatgagaactggaactttgctaataccaactctctcccttgcctctctctctgccctctctctatgtatatacatttgtattaacaagaacccagttctcattcattctggggtaaggggctttcagagaaaaggtaaacacccttgaggctttctgaaatgtcttctttttttaatagtaatgaccctttctcctttacagttgagtgtggtgctttgcatgaagtcacccatctctttccctaaggaggccaactttgaaggatagactttgaagaaagtttatctcagtgctgtttgttaagtggcttaccccaagaggcctcttgcagaagtaattgttaaaaccatgaggcacacctgagagaaaggcgccagggactacctaacaaagctggcacctctggagacactttggaagtatttaatacatatgccctgatggagcatcttactcttcaaagaaaacagttttgaggcacctaagcaattatgtacttattgactttgcgaaaacatttataacatcttaacaatacaattatctgtaagctttctaatgagcccccaagtgacctactagtggaacaaaaactttcttgataagagccagtttccaagagaccatttttaattgtatgaaaactgaaaaatgatggtgttaagaagctgctgttagctctgtgtaaactgtgtggactctttgccagtacagccctcagtgaacacacatctttaatagaaattagcaattgctataacctgtagtcttagaagaaaataaatactgtagaggcctccaaagttattctagttacctactctctatattgggagacagaattcaaactccaaaatttcaaattcttctttgttttatgtctaagtgggttagaataatctaataaaatactcccaataaacaaatcaatcctgcattctttttaaatgttctgtgaaagcaataaaccttgtagctaattttcagtatggcatatacaccagttaacaatacatcttttagaatcagatggtgtgagtttgaacaatgaaccaccaattgttaggtatgtgacttaaagaaagctagttaatttggtggctcagttgtaaaaaagatggtaatagtatctctcacatgtggcatgttaaatgggttaatatatattaactacattaaataacatcacatataagcgtggaagagatgttagtgctcatcattcagccaccctagtaacgatgtattattttctatagttatttcaaaaaatacttttgtatttttgtttttaaaaattatttttattttatagaagagaaaattcagattaaagaaaccataactatcttgactaagattgcactggtatttatcagtagtgttcaacttcaaatgcacatcttctgattatgagaatggtggttcttccatcacgttatagctatttccacatccatttacaattcaagctcttccaatactggaagtgttaaaaatgggatggaaaactgtaactggaagaaataaacactgactattttgtttcacttaaggttaatcaaatttcaaaatgcacattctttttcccattacggtggtataagtaactcattctgtctcttcccctgagaaagttaaaattgtccctgattgcatgtggtatattattgtacataaaagctataaagaatttatcaaaaaactgttagaaataataaatgaattcaataaggttgcaggatacaaatcaacatataaaaattatttccatacactaacaacaatctaaaaaagaaatcaagaaaacaaccccacttacaatagctacaaaaaaaagaaaaataacatacttaagaattaacataaccaaggaggttaaagatttgtacacaaaaaaactataaagcattgattaaagtaattgaaaaagacacaaataattggaaaaacatcctatggatatatcctgcaaattggaagaaataatattgttaaaacgttcatgctattcaaagtaatctacagagtcagcataatctcatcaaaatatcgatgacatgtttcacagaaatgggaaaaaatcctataattctatggaactaaaaaaataacccaagtagccaaagcaatcttgcaaaaaatgaacaaagctgcaggtattatactacctgatttgaaaatacactccaaagctaaagcgattaagacagcatggtactggcataaaaacagacagaaagaccaatggaaaaaaataaagaactcagaaataaatgtatgcatttacagtccattgatttttgacaaaagtgccaatagcacacaatggagaaaagacagttccttcaacaactaatgttggaacaattggatatttgcatgccagtagaatgaaattggaccctaatctcacacaatatttttttaaaaaactgaaaatggattaaagacatttggattaaatgtgtaatttgaaattgtaaaaatactagaagaaaatattggggaaaaagttccatgacattgatctgggaaagactttttggatatgaccttgaaagtactggcaataaagccaaaaagagacaattttgactacatcaaacaaaaatgcttcagcacagccaagcgaacaatcaactgagtgaagagacaacctttgtaatcggccaagcacacatctgttaagaggttactattcaaaatatatattacaaataacccaattaaagaaaacaaataacctggttacgatcaaatgacctgaagagacatttctcagaagaagacatgcaaatggccaacaggtatatgaaaaaatactaaattaatagtcagcagagaaaggcaaatgaaaaccacaatgagatataaccttatatctgttagaataattaatattaaaaagacaaaaggtaacacatgctgataaggatgtcaagaaaaaggaactcttccgcactgttgatgcgaatgtgagtaagtatagccattatagaaaatagtatgaaagttctttaaaaaattaaaaataaaaccaccatatgatcaaggaatcccattacttggtatatatccaaggaaatgaaatcagcatatcaaagaaatatgtgcactccaatgtttattgcagcaccattcataatagccaagacatggaatcaacctaagtgttcatcagcggatgaatggataaataaaatatggcatatgtacacaatagaatactattcagtcttaaaaaagaagcaaattctgtcatttgtgacaacatggatgaacctggagaacgttattttaagtgaagtaagctaggaacagaaagacaaatgctacatgatctcacattatgcagaatttttaaaagttgaaatcatagaaatagagagtagaattgtggttactaggggctgggaggggatgtggtggggagatgttggtaaatggatacaatatttcagttatataggagaaataagttcaagagatctattgtacaacatggtgactgtagttaataacgttttgtattcttgaaaattgccaaaagaatagatgagttttctcaccacaaaaaagtatgtgaggtattgcatacgttgattagccatttcacaaggtatacatatttcaagacatcatgttgtacatgataaatataatttttatttgccaactataacaataaacgaataatagtgtatgacaggtaaaaaaagattgtaagcaaattattttcttatattacaaagaaaaacaaacctttgattcctttgatttaaaacctcatcagtttttaacttccaaatccacaggtgtacctaccatttctgccttcatttctctaactgtggtgaactcctccggctatgctcagtatggtaactgctgctgctttctcaggtgtataatgccaatgactattggctcccttttctgtttctttatcctcacttcgcacagttcttactgtccttccttttctgttttgagaaaacagggctcaaattgtctgtgaacctctctagtggtattgaaatgggaaaagttcccttgtccccctcgcagggcatgcgatggggatgtggctcgctttttcagggccccactgctcaaacaactaggggagcttacagacaggcagactgtggagctccaaccccatggcagtgtttaggggtgaatgtttgcagcttctgaagccccagtgggcgtgtgttacagggtgctcttaatttgctgtctacaggtggcttgtgttagcccaattagaccttctaccttgtccgaggacagagggctttctgtatcccagggtttcttgccttggtgtaccgggagaattagatcacacgtgggcttggagaattagtgtaaagctttattgagtggaagtagctctcaactgatgggggagccagaagggaaatggtcttcccctggagttgggccactcggccttgctctcctctgccgcggccaaactccacctcctcccaccagctgatggcctgctggtatgctggtgcctgtctgtgtgctcttctgcctgcgtgctcctcttgacatcctctcgaggaccagccgcttgcatcttctttcgccaatgtactcctctggacatctggccacctgtgtgtctgcctgctggggcctcgggtttttataggccaaggatgggggcatggtgggtcagggtggacttttgaaatgcaacatttgggcgaaaaagcaggagtgcctgtcctcacctaggtccgtgggatggagccctagtcagggaacacaccttcctctacccagcacttctcttctccccttttgtatcatttaaagggaccacgttcttcccttcccagcactcccttatcagtatgctagcatattgcttttgggattcacttctctaggttttattgtgtgtattttactttttttgtttttaatgtttctttacttattttctttagtatactgaaactgaacagccttagatgtaacaaaatgctatatttgttcagagctgtgagttaatcattggaagagcatcagaaagtaaagaaaacgaatgggatataaacagaatgtgagaattgcagtggcattgataaaacagatggcaactgattttgattaaagggttatgagtttgaattaaaacaaaatatggcgtgagatttggttgaatttagaatagaagtaaaagctgcagataaataaagtgaaagtcagtggtacatggttaatatttaaagcaaaaaaaaagtgaaagaggtagactacattgagacagaagagcatgttgtcaaagtatgaggcttggatgtttcccactttggaaatatttgatgagaaatacgtgttgaccaaaaaaaattttttatcatctaataagcaaatgtgtcagaaaattttgacttaaaataatatttgcaaccaactaaattatatcattcattatctctacttattcatctattctgtgaacataatattctggaataatattctatggtgaatgaaataaactatgggatgtgagaaatactaaaacgtatacttcctgtaagatgtgtgttaactgggagcataaaaagtagtaagaaagcaaaaactttcatgcacaaaccctctaggatgttcaatgtcatggtagttttatggtatgtttatatatattttaaattttattttattttaggttccaggatacatgtgcagacgtgcaggtttgttacataggtaaacgtgtgccatggtgatttgctgcacctaaccacccatcacctaggtattaagccctgcatgcattagccatttgtcctgatgctctcccaccctccacccgccgacaggccctggtgtgtgttgttccctccctgtgtccatgtgttctctttattctactcccacttattagtgagaacatgcggtgtttggttttctgtttcagttactttgttgaggatgatggcttccagcttcatctatgtccctgcaaaggacatgatcccattcctttttatggctgcatagtattccatgatatatatgtactacattttatgtattctatcattgatgggcatttggattgattccaagtctttgctattgtgaatagtgctgcaataaacatatgtgtgtgtatctttataatagaatgatttatattcctttggttatatacccagtaatgggattgctgggctaaatggtatttctggttctagatccttgaggaattgccacactgtcttccacaatggttgaactaatttacattccctccaacagtgtaaaagtgttcctatttctccacagccttgccagcatctattgtttcttgactttttgataattgctcttctgactggcataagatggtagctcattgtggttttaatttgtatttctctaacaatcagtgatgttgagcttttcttcataatttgttggctgtgtaagtatcttctgagaagtgtctgttcatatcctttgcccactttttgatggggttatttgttttattattgtaaatttgtttaagtgccttgtaaattctggatattagacctttatcagatgggtagattgcaaaatttttttcccattcttcaggttgcctgttcactctgatggtagtttcttttggtgtgcagaagctctttagttaattagatcctgcttgtcaatttttgcttttgttgcaattgcttttgacaatttcatcataaaatttttgcccatgcctattctctgaatggtattacctacattttcttctaggatttttatcgttttaggttttacatttaagtctttaatacatcttgagctaatttttgtataaggtgtaaggaaggggtctagtttcagtttgctgcatatggctagcccattttcccagcaccatttattaaatagggaatcatttccccattgcttgtttttgtcaggtttgttgcaattcagatggttgtagatgtgccgtcttatttctgatctgttggtctatgtgtctgctttggtaccagtaccatgctgttttggttactgtagccttgtattatagtttgaagtcaggtggcattatgcctccagctgtgttctttttgcttaggattgtcttggctacacaggctccttcttggttccatatgagttttaaagtagccttttttttttaattctctgaagaatgtcaatggtagtttgatgggaatagcactgaatctataaattactttggacagtatggctattttcacaatattggttcctcgtatccacaaggatgaaatgtttttccatttgtttgtgtcctctcctaattccttgagaagtggtttgtagttctccttgaagtctttcacatcccttgttagctgtattcctaggtattttattctctttgtagcaattatgaatgaaggttcattcatgatttggttctctgtttgtctattgttggtgtatagaaatgcttgtgatttttgcacattgattttgtatcctgagactttgctgaagttgtttatcagcttaaggagattttgggctgagacgatggggttttctaaatatacaatgtcatctgcaaacagagacaatttgatttccagtctttttattcaaatacgctttatttctttctcttgcctgattgccctggccagaacatccaatactatgttgaataggaatggtgaaagaggatttccctgtcttgtgatagttttcaaagggaatgcttccagcttttgcctattcagtatgatattggctgtgggtttgtcataaatagctcttattattttgagatatgttccatcaatacctagtttattgaaagtttttagtatgaagggatgttgaaatttatcggaggccttttctgcatctatttagataatcatgtggtttttgtcattggttctgtttatgtgatgaattgcatttattgatttgtgtctgttgaaccagccttcatcccagggatgaagccgacttgattgtggcagataagctttttgatgtgctgctggatttgatttgccagtattttattgaggattttcacattgatgttcatcagagatattggccagaagttttcttattttgttccgtctctgccaggttttagtatcaggatgatgctgggcttataaaattagttagggagaagtccctccttttgaattgtttgaaatagttccagaaggagtggtaccaactcctttttgtacctctggtggaattcgactgtgagtccatctggtgctgggctttttttggttgttaggctatttattactgcttcaatttcagaatttgttattggtctattcaaggatttgaattcttcctggtgtagtcttgggagggtgtatgcatccaggaatttattcatttcttctagattttctagtttgtttgcatgagatatttatagtattctctgatggtagtttgtatttttatggggtcagtggtgatatgccctttatcatttatattgtgtctatttgattcttctcttttttcttctttattagtctagctagcagtctattttattaatgtcttcaaaaaagaaacaacttctggatttattgatttgctgaagcattttcttgtgtctgtctcttcttcagttcttctccgatcttagttatttcttgttttctgctaaattttggatttatttgcccttgctcctctagttcttttgttgtgatgttagggtgtcagtttgagttctttctagtgctacaaatttccctctaaacattgctttagctgcatcccagagattctggtatgttgtctctttgttcttattggtttcaagaatggtttagtttctgccttaatttcattatttacctagaagtcagtcaggagcaggttgttcaatttccatgtcattgttggttttgagtgaggttcttaatcctgagttctaatttgattgaactgtggtctgagagactgtttgttatgatttcagttcttttgcatttgttgaggagtgcttcacttcccattatgtgatcgattttagagtaaatgccacgtggcactgagaagaatgtatattctgttgtttcaggctggaagggcttgcagatatctatcaggttcacttgatccagagccaagttcaagtcctgaatatccttgttagttttctgtcttgatgatctgtctaatgttgagaatggggtgttaaagtctcttagtattattgtgtggaagtctacgtctctttgtagctctctaagagcttgcttcatgaatctgggtgctcctgtattgggtgcatatacatttaggatagttagctctccttgttgaagtgacccctttaccattatgttatcccctcctttgtgttttttatcttttttggtttaaagtctgttttatcagaaactaggattacaatccttgcttttctctactttccatttgcttggtaaattttttccatccctttattttgagcctatgtgtgtcctggcacatgtcaaggatctcctgaatacagcacactgaggggtcttgactctttatccaatttgccagtctgtgtcttttaattgggtcatttagcccatttacatttaaggttaatattgttatatgtgaatttgatcctgtcatcatgatgctagctggttattttgcacacgagttgatgcagtttctttatagtgtcattgatccttgtatttcagtgtgtttttgcagtggctgatactggtttttcctttctgccccccatgttcatatatttattcaggagtatttaccacctatgataggccaggaattattctcttcttggccctaaagataaagaggtgaacaggatacataattctgataataataactttagataactgctatgaaatgaaagacagagtggagttatcaagagttattgagtgggggagtggtgagaagttgtaattttaaatagattagtcaagtaactctcactaccaccaccaccaccatttcaggcagtaccatgtgatttaaggaggaatagaaaacattaggtggaatgatggaggagaaagtagattttgaattgaactataaagaatgaagagaattttgaacaaataagggaggagatgtgaattccaaattaagggaatcgtcataatagtggtatgtagtcaggaaagatcaagccatacctggagaagaattatttagggttcctgcaggagatgagttacaaagtaggtagtacttagattttatagacagtggttacaaatatatttagttaaatgaagagtgtgccagtaagccagtagagtttattaaaacaaaaacagtataggagactgtacataacaccatgttaagaaagttaactcagaaatgatgtgcagggtacattaaacagaataggaatggagacaaggcactccactagaacactatgacaacattacacaaaagaggggctgggaagtcaagacttaatcaagggaggcatcagtaggtatgggaagaaaaagaagacggtcctgagagaatagtgaagaaagacactagacaacttgtatctacctgatctataagcctttttctatctctctttcaatctcttaggctcttacattgtatgttatttattttcccttcttggtatctctaagtctctttatcttttaaattttctctccagtgtctgtatttatttctctcttccaccacttagtcttccttcccatttgtcttgacttcataactgtactttacatggtaataacacatagaaaatagtaattaagtacttttacttttaacattagtaatttctacttttttttctaaatttagtcattatataactaagactttttattccccatcaaaaaacccttgttttttctgtatgttttatctgattctgttttctaaatttttagcgaaaaaagtttcccaaatttaagatactctataaaatagtaatatgttttggggacttagttttagaaaaatccctcaggaaattctgccttttgaatagaataaagaatgcatgtcaaatgggattgaaaattatgactgtcttcattccaatgtgaagataaattggccttggcccatgcagcaggtgataaaattaaaattagctaccaacagatctggaggtaaaacatcactttactgtgtttacatttcttaatctattggtgatgatgttttattaagaagggcctactaaagaaagaaaggtcaaaagcatggcttaagtagtaagaacagaaaaatatgacacacatatgaggaatgtgaagaaaaatatttcacattatttaatatacagaaagcaatatgaaaaagcagggaaattttcaagtgatgaagtccattaaacaaatatctcatgaaagagggaaacagtctttgaatgcaaaattcaggaatggaaaaataaataagaagataatatctaaagagagcaacattgatatctctcatagaactaactaaagctcaagaataagtacacttagactggagtgtatcaactcttcaatatctgtcccaacattgcaattatcttttaaactttcaataaaaacagctgactggtgaaaaagttaattttgtagtataagattattgaacctgtgaggttcaataagtgagtttactatccaaagaggaaattggtggctgccacttgctccctatagttttgacagcttctttgatgtccttattcctcaatgtgtaaattatagggtttagcatgggggtaacaacactgtacaacactgaaaccaacctatctttctttaatgagtaagttgagatgggccgtacatatgtaaagatggcgctgccataaaagagaaagacaatggccaggtgggaggcacatgtagaaaaggcttttcgtcttccctctgaggactggatcctcaagatggtggagattatgcaaatgtaggaaagtacgatacaaaggaaaggagtccaaccaatgaagaccccagtggatagcagtgccaactcattgacagaagtgtttccacaagacaagatcagcaaaggggggatgtcacagaagaagtaattaatctgattgttgccacagaagggcaggcagaatgtcaacactgtatgcaccactgagttaaggaaaccagcagcccagcatgaggctgctaattgattgcatagaaccttgctcagaataactgaataccttaaaggattgcagattgcaatgtaacgatcatatgccattgctgccagtaggagacactctgatcctacaaagaaaacaaatgcaaaaagttgaaccacacaccccacataagaaatgctttttttctttgagaggaggtgcaccatcatctgggggacattgctggtggtgtagcagatgtcaataaaggccaagttccctagaaaataatacataggtgtatgcaggtgtggatcagtcacagtcgtcaagataattaatatatttcctcccaaagtacagaaataagtcagaaagaagatggtgaatagtaaaaactgcaattcatttaggttggagaatcccaagatgatgaattcagttatagctgtttgattctttctttccatgatgtcgcctggtttcctttcaggaattgggcaaagagaagaccagattataaaaatgaatcatatgctgcaatagcatgacctgaaaaataagggaaaaaacggttacaaataaaagtaatcaccatttatgtcaaaccagagaagcagcattcttttgcaaaccatagctcctacctaccatgcaacacagatataaatacatccaatgtttcacctgcagatcaaatctttttaaatatacaacactggaagttttaaattagaatacaaatggacaccatatgtcctagagttctctgttaataatggctgggtcatgctcaccggcattttcttggggatgtgtgaacttgtgctgtagaatgcgatttctagaagaatctctggtattcatttgcttctttgaagccatccctgctctcctttttcatacttcaacgttaatataaattttgttttatattcttttccgattaaaattaatgtatttgttttagaatatttgggaaaaatatagaaaagaaaatttaaaacattaaaaatctttagtagtcaccagagaaaatctctattaatgatttggtatatgttcttctgatccattttccatatagaaatgttgaatagaggatcaaaagtacctattttaatctgatttttccttaattttccgtggcaatacattttatgctaaaacatgatctttgagttgtattcaagtatttgtatgaatatagcaaagtttttatatatcccacccttattaatgaatatttatattgttttatttgttcatttttgatatgataaatttcaacaagaagcatattgaattagattccctgaatttggggttaggttatctgaatttttataaactttccaagagacttatcctaatgaattagaaacctattgctatagatcatcaatctggaaaattcaagagctatttggctggtgcaggaattagtgtctgtttcaacaaattattgttaagtgcttcatatagaaggatgctgataatctctgagcacttcctacacagcatctcatttagtctttacataaatcctttaagataagtaatatttatcattcccattctctggatgagagcaccaagcctcagcaagataaacgtctggaagatgtcacgcagctagcaggtaaaaaaaaggtagctttatcactcccaaagctaatatactttcagttgagtggctaaaaatttaatttccattaacttatgacaacagaatgcccttaaaaaacacttctcttgttttgaatataacctacgttcatacaactgaattattttaactggttacaaattgttatgacttctatttctgactgttaatggcaatgtgctatgcctgcagtgttttgatggttaaatccaattgtttctaaatacctggtttttatttgaatatgtttatttgaacaatcaatttctagtgtagttttttatttcctggaccagctatagattaatttaaatgttcatgtttgtgttattaaaagatactcttctagagcttagtttaagttggttaataaaaatgtttaataaaattaaaacagttgtagggagaatcccctaatttaaaatgctcaaggcctaattcaagtgagaaaaattaatctgcagtttgatgtttgaagcaaattataaaaacttagataaataaaacaaaataaaaacttaaaaatgaagataattgttgtatattcattcaaactatatactttatcgattgccctcacctatagacaaatatgcatttcaatgtcaagtttgagaggtggcttaattgtgcttttgttgtaattgctgtcttctttcctcgtgaactactgtggatatttttaatgaagggagaggataagttgaaaaaattcacataatatagtatttcacattaccacaactgaataaattcactgggacaattttcattccatctacagaagaactccaaaattgtattctcaaatcaatctttttccctattccaaatctctatctcccctttcatcttttttaacatttccttccacttctgaggaggaattaacccttctactcattttattcaacaaatgtattttaaggcaaaaatgtggaaaaaagggaactggcacagtgttaatggaaatgtaaattaatagagccattttggaaaacagtgcagtttcttcaaaaaactaaaaatgcaactactatgtgatccagcaattccacttctggatatatattcaaaggaattgaaatcagtatctcaaagagatatctgcactcccatggtctttgcagcattattcacagtagccatggaaacaacctaaatcttcaccaatagatgaatgactaaagaaatgttatatatacctggtggaatactatgcagcctttaaaaaaagaaaatcctgtcatttctgacatgggttaagctagaggacattatgctgagtgaaatgagccaggcacagaaagacaagtattgcatgatctcccttatatgtggaatctaaaaaggtcaaatctattgaggtagaaaatagaatggtggttaccagagtttgaggtaggagtggacaggggtggactggtcaaagggtacaaagtttcagttacacaggagaagtaacttctaatgatttattgtatagcatggtgactatagttaaaatgtattgtatattccaaaattgctaatggagtggattttaaatattttccccacaaagtaatgataagtatgtgaggtggcagatatgttatttagcctgctgtactcattccaaaatatatacatgcattataacatcacgttatatatatactgcagactagagtggtgacaatttggttggatagaaatagaggcatttgagagatattagaatatacagtgttacaattttggtataaaatgacgaagaaggataaattaaggatagtagttataaccaacatatattaaatgcttattataacataaccattcaacaatcattgtattacccagttcacatgcccacacacactaaaaacgcacacgcacacaatgaaagagacatattatgtccacattacaagtaaaaaattttaaaataagtttcagagaaattaaataatttgcctaaagttactcagacttgcagtggtgttattgggttttacatttcactttgtggcctaaacgagtgcactgtgctgatctagattcctggattgaacaagcagatggctgggggtgtcattctctgaaatgaaagcaggaaattggcacttgttggcaaatctggcaagatggctgaataggaacagctctgctctgcagctcccagtgagaccaatgcagaaggcaggtgatttctgcatttccaactgaggtaccagttaggtaactggttaggaagcaggtgcagcacctggagggcaggcagaagcatggtgtggcatcgcctcactcgggaagtgcaaggagcttccccagccaagggaagctgtgagggactgtgctattcacccacatactacacctttcccacggtttttgcaatccgcagaccaggagattctctcatgtgcctacaccaccaggggcctgggtttcaagcacaaaactgggtggctgtttgggcagacactgagccagctgcaggagtttttttcataccccagtggcacctggaacatcaacagacagaactgttcactcccctggaaagggggctgaagccaagtgctctcactcagcgggtcccactcctatggagcccagcaagctaaggaccactggcttaaaattctcactgccagcacagcagtctgaagtcgaccctggatgatcgagcttgttgtggggaggggcatccaccattagtgaggcttgagtaggcagttttcccctgacagtgctaaggaggcctggaagtttggactgggtggaactcaacacagcgtggcaaagtggctgtggccagactgcttctctagattcctcctcactggggagggcatctctgaaagaaaggcagcagtcccagtcaggggcttagagataaaactcccatcttcctgggacagagcacctgggggaaggggcagctgtgggcgcagcttcatcagacttaagcattcctgcctgccggctctgaagagaacagtggattctgacaaggagggttctcccagcacagcgctcaagctctgctaagggacagactgcctctgccagtgaatccctgaccccagtgcctactgactgagagagactccccaacaggggttgacagacacctcatagaggagagtccagctggcactgggcttccctttgggatgaagcttccagaggaagaagcaggcagtaatagttgccgttctgcagcctccactggtgatactcaggcaaatagggtctggagtgaaccttgagcaaactgcagcagacctgcagaagaggggcctgactggtagaagaaaaactaacaaacagaaagcaataacatcaacatcaacaaaaaggacccccacacaaaatcccatccaaaggtcatcaacctcaaagatcaaaggtagataaatccacgaagatgaggaaaaaccagcacaaaaatgctgaaaattccaaaaacattcttctagagaaaaatgtcttttctccaaatgattgcaactcctctccagcaagtgcacaaaactgggcagagaatgagtttgatgaattcacagaagtaggcttcagaaggtgggaaataacaaactccattgagctaaaggagcatgttctaacccaatgcaatgaagctaagaaatttgacaaaagattacaggaaccgctaactagaagtttagagaaaaacataagtgacttgatggagctgaaaaacacatcatgagaacttcatgaagcatacacaagtatcaatagctgaattgatcaaccagaagaaaggatatcagagattgaagatcaacttactaaaataaggtgtgaagacaatattagagaaaaaagagggaaaaggaaggaaaaaagtctccaagaaatatgggactatgtgaaaagaccaaacatgtgattgggtggtatacttgaaagtaacatggagaatgagaccaagttggaaaacacacttcaaaatattatccaggagaccttccccaacctagcaagacaggtcaacatccaaattcaggaaatacagagaacaccactaagatactcctcgagaagggcaaccccaagacacataatcatcagattatccaaggtcgaaatgaaagaaaaaatgttaaggacagtcagagagaaaggtcaggttacctacaaagggaagcccatcagactaacagtggatctctccgcagaaaacccacaagccagaagagagtggggaccaatattcaacattcttaaaaaaaaagaattttcaactcagaattttgcatacagccaaactaagcttcataagtgcaggagaaataaaatcatttacagacaagcaaatgctgagggattatgtcaccaccaggcctgctttacaagagctcctaaaggaagcactaaacagggaaaggaaaaagtagtaccagccactgcaaaaacacaccgtaatataaaaaccaaagacactatgaagaaactgcatcaactaatgttcaaagtaaccaactagcatcatgatgaatggatcaaattcacactaacaatattaatcttaaatgtaaatgggctgaatgtcccaattaaaagacacagactggcaaattgaataaagtgtcaagacccatcagtgtgcagtattcaggagacccatctcatgtgcaaagacacacataggctcaaaacaaagggacagagaaatatttaccaagcaaatggaaagagaaaaaaaaagcaggggttgcaatcctagtctctgataaaacagaatttaaaccgacagagatcaaaaaagacaaagaaaggcattacacaatggtaaagggatcaatgcaacaagaagagctaactatcctaaatacatatgcacccaataaaggagcacccagattcataaaacaagttcttacagacctacaaaagacttagactcccatacaataataatggaagactttaacactccactgtcaatattagacagatcaatgagacagaaaattatcaagaatattcaggacttgaattcagctctggaccaagcagacctaatagacatctactgaactctccaccccaaatcaacagaatatacattcttctcagcaccacatagcaattattctaaaatcgaccacataattggaagtaaaacactcctcagcaaatgcaaaagaatggaaatcaaaacaaacagtctctcagaccacagtgcaatcaaattagaactcagcattaagaaactcactcaaaacctcacaactacatgaaacctcacaattacattaacaacctgctcctgaatgactactgggtaaataatgaaattaagggaggaataatgaagttatttgaaaccagtgagaacaaagagacaataaactataatctcagggacacagctagagcagtgttaagagaaaaatttagagcactaaatgcccacgtcagaaagcaggaaagatttaaaatcgaccccctaacatcacaattaaaagagctaaagaagcaagagcaaacacattcaaaagctagcagaagacaagaaataactaagatcagagcagaactgaaggagatagagacacgaaaaacccttcaaaacatcagtgaatgcaggagctggttatttgagaagattaacaaaagagatagactgctagccagactagtaaagaagaaaagagagaagaatcaaatagacacaataaaaaatggtaaaggagttatcaccactgatcccacagtaatagaaactaccatgagagaatactataaatatctctatgcaaataaactagaaaatctagaagaaatggataaattcctggacacatacacccttccaagcctaaaccaggaagaagtcgaatccctgaatagaccaataacaagtactgaaattgaggcagtaattagtagcctaaaaaaacaaaaaatctccaggatctgatggattcatggctgaattctaccagaggtacaaagaggagctggtaccattcgttttgaaactattccaaacaataaaaaagagggactcctctctagctcattttatgaggccagcatcatcctgataccaaaacctggcaaagacacaacaaaaaaagaaaatttcagtccaatatccctaatgaacctcgatgcaaaaatgctcaataaactactggcaaaccaaatccagcagcacatcaaaaatcttatccactacaatcaagtcggcttcatacctgggataaaaggctggttcaacatacacaaatcaataaacataatctatcacataaacaaccaatgacaaaaaccacatgattatctcaatagatgcagaaaaggcctttgataaaattccataccccttcatgctaaaaactctcaataaactaaatattgatggaacatatatataaaaaaagacctattcacaacaaacccatagccaatatcataatgaatgggcaaaagctggaagcgtactctttgaaaacctgcacaagtcaaggatgccctctctcaccactcctattccacatagtattggaagttctgcccagggcaatcaggcaagagaaagaaataaatggtattcaaataggaagagaggaagtctaattgcctctgtttgcagatgacataattgtatatttagaaaaccccatcatctcagcccaaaactccttaggctgatgagccacttcagcaaagtctcaggatacaaaatcaatgtgcaaaaattacaagcattcctatacaccaataatagacaagcagaaagctgaatcatgagtgaactcccattcacaattaccataaaaaaataagatacctaggaatacaacttacaagggatgtgatggacctctttaaggagaattacaaactgcttctcaaggaaataagagaggacacaaatgaagagaaaaaaattccatggtcatggatacgaagaatcaatactgtgtaaatggccatactgcccaaagtaatttatagattcaatgctattcccatcaagctaccattgattttcttctcagaactagaaaaaacgactttaaatttcatatggaaccaaaaaaagagcccgtatagccaagacaatcctaagcaaaaagaacaaagctgggccgggcgcggtggctcacgcctgtaatcccagcactttgggaggccgaggcgggcggatcacgaggtcaggagatcgagaccatcccggctaaaacggtgaaaccccgtctctactaaaaatacaaaaaattagccgggcgtagtggcgggcgcctgtagtcccagctacttgggaggctgaggcaggagaatggcgtgaacccgggaggcggagcttgcagtgagccgagatcccgccactgcactccagcctgggcgacagagcgagactccgtctcaaaaaaaaaaaaaaaaaaaaaaaaaaaaaaaaaaaaaaagaacaaagctggaggcatcatgttacctgacttcaaactagactacaaggctacagtaaccaaaacagcatgatactggtaccaaaactgatatatagaccaatggaacagaacagaggcctcagaaataacaccacacatctacaacctgacaaacctgacaaaacctttgttttgacaaacctgaaaaaacctgacaaacctgacaaaaacaagcaatggggaaaggattctttgttgaataattggtgctgggaaaattggctagccacatgcagaaaacagaaactggacccctcccttacaccttatacaaaaattaactcaagatggattaaagacttaagcataaaacctaaacccatacaaaccctagaagaaaaccttggcaataccattcaggacataggcatgggcaaagacttcatgactaaaacaccaaaagcaatgcaacaaaagccaaaattgacaaacgggatctaattaaactaaagagcttctgcatagaaaaaaaaaaaaaaactatcatcggactgaacaggaaacctacagaatgggagaaaattttggctatctatccatctggcaaaggtctaatatccagaatctacaaggaacttaaacatatttacaagaaaaaacaaacaaccccatcaaaaagtgggtgatggatatgaacagacacttctcaaaagaagacatttatgtggccaacaaacatatgaaaaaaagctcatcatcatgggtcattatagaaatgcaaatcaaaaccacaataagataccatctcacgccagtttgaatggaaatcattaaaaagtctgcaaacagcagatgttggcgaggatgtggagaaataggaaggcttttacattgttgatgggagtgtaaattagttcaaccattgtggaaggcagtgtggcaattacccaaggatctataaccagaaatactatttaacccagcaatcccattactgggtatatacccaaaggattataaatcattctactataaagacacatgcatacgtaggtttattgtggcattatttaaagtagcaaagacttggaaccaacacaaatgcccatcaatgatagactggataaagaaaatgtggcacatatataccatggaatactatgcagccataaaaaagaatgagatcatgtcctttgtagggacatggatgaagctgggaaccatcatcctcagcaaactatcacaggaacagaaaaccagacactacatgttctcactcataagtgggagttgaacaatgagaacacatggacacagggagggaacctcacacactggggcctgttggggagtaggtggcaaggggagggagagcattaggacaaatagctaatgcatgcggggcttaaaaccgagatgacgtgttgatcagtgcagcaaaccaccatggcacatgtacacctatgtaacaaacctgcacattctgcatatgtatccctgaacttaaagtaaagtatattaaaaaaaaaaaaaaaaaaaaggaaatccagggggagatcatgtgttcagttttggccatgctgaatttgagatatctgaatatctaagaaaatatgtttatttgacatattttggtatgtggcctcagaggagaggtatgtactagagatacgaatttgtaacacatcagcatatagaggatagttgaaactactcctatggatgggagagtgtgaagtaggaaaaaagagaacacagaattgaactttctcagaactaatttcctgcatgtagaagctaaactatgagactaagaaggagaagcataaaagtagaaagaaattcaaggaagcactgaattacagttagtgtatgaaagagtgctgttattaaaagaactgtttgtgaaaataaggggccccatttttcttgccagaccattcctcatgagaaaagctatcctgcagagaactgccctccaacacaaacataggtcattatgagatggtatcagctgtccagttctcaaaatagcgaaggaggacacacttggctcagcagcccacctcccttctcagggtttcttacacattaagagaaggaattactttctcctggggatctcctgatgcttttgttttgttacccaagtcctctatgttctgtgatcattgccctttacttcaaaacatgcctttcccatgtccctatttgtggggaagctgttgtgataaaacgactaaatgaaataacttaaacaataatgtattactcctctaaggttatttgccttaaaataagaattttctttttcagaatagcctcttaattttagtcatttttttatccactcagcctgtatgtttttcttcctgctttcatttctgtctgctaatctacatatttttaaagctcagcttaaatgcctcttttctcttcaagtgaaatgcttctgtcccttcctggaaaatctataggcatttgtttcaatcttgattatgacacataacacacaacatacttatttgtgtgacatatcacttgtttgtccataatatcttatggtgcatattctgtcttactaatctatttctcaatgaattaatacgtaactggggacacagtggtcttacattcagtaatggattactactgttggaatataaggcagtatagcaaaattttccaagaaaacaattgtatttcctcccttttttacatacttattatgatgtagaacttggaaaaaatgttcagaccttacatattatttttattcttataacatttatattagttagagtagaggagtctgtaatttatggtggattacttataagatcaaatagttaacaagtagtgaactaagagtagaaaaaaattcttctatttccaaatctagaacaacatcctgcagctggtactcaaattgtgctacatgggtcattgttgcctctcataggcatagattgaccctgagacagaatagaattcaccacgcaaagcacaagtatttcacacagagttataggaaaattactgcttttccaagcagccatggtcttgactccttactaaagaaccgaaacttgatataatacaaggacaactgagaaaatgttttcagaatttcatatcatagtaaagagctcaagaatggcctctaagaacccacaaggagaggcccccagaaaattcacgagaatgtttgccctccaagctcagtcttgactttttcatttccttctaacagacccagtagctcttcattaaagagtgttctcaaaaaagagaccttagaaattcagaatcttaaaatttcaaattttctcaaaatatactatccaatttcttactaaaaactgaaatcacatagcaaacgtgaaaatcagtgtggctaaagctcaatcaataatagctagcatgcaaggttattagatccacatgaaagatggtttcttgtgagaaagtcacacgaagtgtgttcctgatactattctctgcagtccagtggcattttagtctctttttgcagaataaatacactgtcctttatttaataaaaaatcggcaaaccagcagagggctattctgaatgacataaaaattacccaaaatgaaagaagcttcctgattcacatactcagtaggctgattgtcacccaaagcatgggacagacaattttattattccctcctttggaactcctcaggtcattacacttccatctcctacacagttagtctcatatccaaaaagcaagacagaaaagtgtatctctaagagcaatgaagctatagttaagcaattaaaaatacttactcactcacctgtgattggagatattgagcagagattaccattcagactctgagagactgatatggggctgtttttaagaatacaacgaagtaacacaaaataatgttccctacagagtctgtgctgataaacttctgagtgatgggttttctaggtgagtgccaagactctactcagtccctgaaggccagtgcatgggactggagtgagtaaggaaaatgccctttggattaagaagatccccacatcttatgggaatatttcaagagcctcggagacacacgttggggatcttcaagcacaagtcctgagactcactacttctggttcctgcttcaacccctgagcatctatttgtcttctagtggctctgttgccatcataattatgcttcagaaagtgtcctgtggagtccgacctgctccaggtggaccactacctcctggcccacatctgtctagtgagaaacaacccacatgcttcccctattaacacaggaaatgcagttctctagattttgcttcttggccatgtaagaaatatcagtctttggactccaaaattccagatgtagaaatcaagctctctaactggtttttctctcagcttaaattaggagaaagcatcctcatttcctcctggaggtgggggaagcttacattgcacactacttcgcactgaagaaatattcttcagccaccgaagactgattagtcctccaaatatctattcctttgcatgttatgtgttcttgaagatgtatcaaaaactcactaacgaatatacagtatccatatattttgtgatagattaaatattaattttgagcatgacttgtaaattaaaagtataattgcttgattaattttgatcctataattatttaagaattgaggcagctaagtatgccactatcacataaaaacagaatttctgaatcctttgacctctaatgattatattgcctgccctttaaaattaagaatttggattaaagaagagttatttctcccagattcatatggttcttaatcatcacctatggcttaaaatcaaatctcaattctcaacaaattaattacctactaggcattatccaatttcatcacttgctaaattcttaccggctgacttgggtacacacagcaagagagttatcatctgaagatatctatgagtggttatttcactccaaaaacagacgataataaattttgcattattcatttattgtatctaacattcattaccaataagtctttttaaatttttttattttatatttatttttagtttttacttttttaaaaaaattcaacttctattttagacatagtggatatatgtgcagatttgttacatgggaatattgcatgatgttcaaatttggagtatggatctcaccaccctggtaatgagcctagtacctggcttgataggcagttttttaacccatcctcccccatccctgaagcctctggtagtccacagtgtctattgttcccatacctatgttcatgtgtgctcaatgcttaactcccacttataagttacaacatgcagtatttggttttctgttcctgtgttaacttgcttagaattatgccctccagctccatccatgttgctgcaaaggacattattttattctgtttttatggctgcatagtattccatggtgcatatgtaacacattttctttatccagtctgtcattccacatctttgctattgtgagcagcgcaacaatgaacatgtgagtgtatgtatcctattggtagaatgatttattttattttgatatatacccattaatgagattgctgtattgaatagtagttctgttttaaattatttgagaaatctccagactgcttttcacagttgctggactaatccacattcccaccaacagcatataagcattcccttttctctgcagctttgatagcatctgttgttttttgactttttaaatagtcattctgactggtgtgagataatatctcactgcagttttgatttgcatttccctgataattagtgatgctgataattttttcgtatgtttgttagccacatgtatgtcttcttttgagagtgttttttcatgtcctttgcccatttattaatgggattattggctttctgcttgttgacttgtttaagttccctatagattctggatattaggcctttgtcagatgcattgtttgtgaatatcttctccctttctgtagatagtgtgtttgctctgttgatagtttcttttgctgtgcagaagctctttagtttaatcaggtctcacttgtctatttttgtttttgttgccattgcttttggtgacttagccaaaaatcttttgccaaggccgatgttgagaagagtatttcctaggttatcttccatgatttctataatttgaggtcttacatttaaatctttaatcaattttgagttaacttttgtatagggtaaaaggtaggtatccagcttcaatcttctgtatatgacaaggaagttatccccgcaccatttattaaatagggaatcatttccccgtagcttgttttcttcttataaatctaggagtttggggtgtctttgctttttatgatgtataataagggatttaccaataatgtgtgctctctaacattaaatcagctgtttttttccagtgaataaattgagattaaatgagtgtacgtgactataaatggccataacaaaaaagaaatagatagggtagagacaaaaaggaaaaaaaatttcacttcctttttaaagatgatctattcagaataataaaaatgaggtgaaaataggaaaatattattaagagcaaaataatagtagaatcaactcttttatagagatatactcatagaacagagtaggaaaacagggacatcatacactgaaatatttgctctgtttgtttctacaaaaaaaggagaaaaaaagttaacaaagtgtgaatttaagataaggcctggagtgctggctcacacctgtaatcctatcactttgggaggcagaggcaggaagatcccttgagcccaggagttcaagaccagcctgggaaacatagggcgactctgtctcaatttaagaaaaaaaaaatataagcatcaaccctgaacagtattgccagctacatatgttgtacctcgatcaggagtgactacattagtgcctgtgatttagattatatcacactaatgttattgatactagaaagtagtcgtgtgtacccacaacagataggaagatctacattccgcaacctcaaaaataatgatttttgtgtttcattacttgccataataaagtaacgagattttctctcctgattaaacatctaaaaaatggaataaaatatataaagcaatgattttaatacactgtacaagacagggttgggtatgtcccatgacccatcagcctgattggaacagcttgtaatagacaaggacttaggtggagtcctgagaaggatattaccttagtagtgggggctaaattaatctcagaataaacaatgttctggatctaccttaacaaaaaaaaaagtatgcctcaaaataagcataataatttaggggaaatacagacataaaaagagagagatttttttaaagacccacatagaacttgtttaaataaaaaatacaaaatataaagtgaaaaatgcagtgcatggaataaacagtagattaattactgcagaagaaaaaatcaaggaacttggagatatagatataaaaacaatccaaaatgaagcacagagaaatctttttaataaaatggacaaagtatcaatgacctatgtcataatttcaagcagtctaacatatgtgcaagtggagtactaaagaagtgtttgattaaaaacattgaagaagtaatgactgagtttttccaaatttgataaaatatataatctatagatccaagaagctcaataaaaattaaatagaataaatattagaaaactttacaatgaacatcataatctatttgctaaaaaagtcataaagaaaaatcttaaaatcagcaagagaaaaatcaacacagttattacaaaggaataaagataagaatggcagcatgcatcccaccagaaattatgtgagacaggtaatggagcaacagctttaaagcacataaacaaaagtctggcaatttaaaattttatatacagagaaaacatctcttaaaaataagggcaaagtactttttcatgccaacaaaagctgaagtaaattattaccagcagaactttactacaagaaatagttaaggaaagtctttagacaacaacaacaaaaaaatgatacgagatgaaaatcagtgtctccatgaagggaccaaaagtgccagaaattataaatatgtgtttaagtgtaaaagacatttttattatttttaattaccttaaaaataatagaatttttcaaaaaaaacagaattgcagtatcttggatactaataacataagtaaaagtaaaatgtgtgacattaaaatcacaaagcatgagcagggagatggaagtacagtatggcatgactctagcaatacatcttaaatggtgtaatattatgtgaagaaatattttgtgaatttaaaatgtacattgtaaaccccagagtaaccacaaaaatataaaataaaaaggtataaataaaaggacaatagtgaaaatataatgaaatcataaaaatattcccataaaaaacagtaaatgaaagaagaagcaataacggacaaataggacaaatgaaaggcaaacagttggaggacaaatttaaatttaattctatcaaaaatttagttggaggataaatttaaatttaattctatcaaaaatttatcaaatttaaattgtgcaaacactccaactgaaacaaagagcttgtcacattggcttaatgggtatgaaaatgcagttagatagaatgaagaacttctagtattcaacagtaaactaatgcagggacagtaatgtaggtttagcttgattgtggtagtctcttcacaatgtatacatatactaaagcatcatgttgtgaagcctaaatatatgcaatttttatttgttaattatacttcaataagctggggaaaaacaagatattttcaatggctagaaaaatctctccctaaaattaaatacccattaaaaattctcttcaagaattaagattaacaaaaatgatattctagataaaaactgttgtgagaaaaattatcatcagtacattcctgctgaaggaaacacaaaaggaaaaaaaataggcaaaaataaagattatctcatatggaatttcagtaagatacttctattacttggaaaattccaaaggtttttgtcctaggagaaatgccacattcttttttacacagcagattcctactctaaccctccccatacttcctacctccttagttctccttgccaccgaattatcctgacatatgtacttacgcgtttggttatttggggcctccatcacattaaactttatgtttgatgacattatggaatttgttttgcttgctcctgtgtttcttgaacctactacactgcctaatataatatgtgctcaaaatttttgaaagaaaaatataaaccaggtaaacaaatcatttcttacagtgaagtgatggaaatcagtcttaatagaaatcagatatccctcattagtcctagtggtgttgctgccagtctttaaacaacttcctaccaaagattttcttcagagccatcatcacttctttgttcctaagggtgtagattagtggattcagtacaggggtgacggcgctatacatgatggccattatccggtcctgaatcatggaggtggctgaagcaggacgaatatatgtgaagcccacaggtccatagaaaagacataccaccataaaatgggaggcacaagtggacagagccttgtggagtattctgcaggacctgttcttaaacagaaggaagccaattacatagaagcaggagagaagagtcagaaagaaagctcccatggatatgctgcctgtgacaatggaaagaagccattgattgagtaatgtgtcactacaggccaattctaagagcggcttgacatcgtagaagaagtgattgagtttctgagagccacaaaaactcaggtgtgcagtcatgacagaatgcatcagagcgtaaaagaagctgatgagccaggccgcagctgccaacagaatacacacctgggggttcatgatgacagtgtagcgaagaggattgcagatggcaacaaaacggtcaaaggccatgatagccagtaaaatggcctctgtgcttcccaaaaagtggaagaagtgtagctgggtgatacagcctagaaaagatatagccctgcgactgcacacgaggtttacgagcagcttgggcagtgtcactgaagaataagaaatatccagacaagaaaggtttcccagaaaaaaatacataggggagtggagttgtggttccaaaacaaccatcaccaatatagatccatttccaatcaagtttatcaggtaaatgattaagaaaatcccaaagaagaaaggctgcagctcctgaacaccagtcaggccaagtagaagaaactcattcattgtagtgacattctccattgctctgggaagcaaatttaacaataacagaattaatttttctgaatttttaattttacactgtgaggattaaataaagcaagtttactatttggaggaacctaggggtgagcaacagtgtgaagaatagttacgaacagtaaaactaaatttatgtacaacaaaattgaggaagactaatatacctgataaattctgagctgttaaaatggcactagactaataaaagcattatattatgaacaaatcagatatagataaagggcatttgttttcaaaactaggaagtgcaagatttgatggacataatcataacctcatgtatggcattagaattatgtattacaaaaattttaaacatacaaacagggaatagtttttcaacttatgattctaggttctggcaaaaattcagatgtagctcagtggggatttcatcacttcttctaagatacataaaagccacaagagagtaacacatgtcttctgacaacccaaactttcagtgaaagtaagaaacataaacacccacaaaccaaatgttgtatgagtagaggagaaaaaaacagcaaaattagcatcattagtcacaagactgtgtcatagcaatgaggcagtggatgtagttgggaaaaacttgaaatagttagaggtcccattagtagaagaacttcgaaaacacccccaatttttcaatccaaaaggggagtacctcccagggagtgagaatttctgtggggcaggggatagaaaaaggcacagtctaagcactgaaggtgatggagagaagaggtatagtaaatatatgaagaacaaaggaagcttgtcatttgtaagtaattaataataataataataataacaataataataatcaccaccttatcaacagaagagggagcccttgcactgaggaattggaaaggctaactaggatactcctcccacccatgcctactaagattcttctgctaataattggtccacaatatcataagttctccagtgtaagttctccataaaataactctaaaaatagacagaaataaagacatagttaaaaccacaatcacaatgagaagatttaacaagtttctctctatacctgacagaagaatcagccaaaaagtcagtaaggatataaacatctgaacaacataatttacaaatttgattaacatataaagaacactgaacccaaccaaaaaataattcacattattttcaagtatatcttgtacatatttacaaaatcaagcatgagttgagtattaccaaaaggcttcaaaaggtttcaaaaggttgagctattcaaagaatgtcccttgaccacactggaattaaaaaacaataagaaaaatgcatctagaaactcaccaattgcttcatattatgtaatacacacaaataattcataaagaaaaaattcaaataaaattagaaaaaaattgaaatgaacaatgatgaagatgagatatatcaaaacttttggcatatagctaaagaaataaatagagggaaattgtcagccttaaatgcatatgttagaaaaaaagaaatattgaaaaaccaataacctaaactttcatttcaaacagctaaatgaatgaatgcatgaatgaatgaacaaataatccaacaactcaaacctaaacaaagtagaagggaaatagctaaaataataacaagaataattgaaatagaaaacaaaagttcaataaagaaaagtcaacaaagtcaaaatttagtcatttgaaaagattaatgaaagttatcaactcagtaaaattgttaaaagagagagagaatacaaattttaagctagtatcactacagatactatcaacgtcaaacattgtaaaaggtcgttatgaacgacttcatgcccaagaatttggcaatttaaataaaattttaaaattacttaaaccaaaagtaacttaccaaaattgacagtagaagaaagacaatttcaatagtttgatatttatataggaaagtgtagttcttattcaaaatttttccagaaaggaaacaccaagtccagattttactggtgaattctaccaaataattaaggaagaaataataacttacacaaatactttcaaaacaatgaaaaaggagcacttctatatttcttttataaggttagcacaactttgataccaacactttaaaaagaactcaacagaggccaggcgcggtggctcacggctgtaatcccagcactttgggaggccgaggagggcggatcacgaggtcaggagatctagaccatcctggctaacatggtgaaacaccgtctctactaaaaatacaaaaaattagcctggtgtggtggcaggagcctgtagtcccagctacccgggaggctgaggcaggagaatggcttgaacccgggaggaggagcttgcagtgagctgaggtcgcgccactgcactccagcctgggcgatagagcgagactccatctcaaaaaaaaaaaaaaaacaaaaaaacttaacagaaaggaactgcagactaacctgtcttgtgactatagatgcaaaaatcttgaaaaaatgaataaaaacaagcaatatctacatcgcaaccaaataaaatttatttgaagatgtaagggtaatttaacattaaaaaataaattaatacaatagccatattagagaaagaaaacaagaaacaccacagatgcagtaaaagcatttgattatatttagcacccactcatgatttaataaaataatccttagcaaactagggatacaagggaaattagtttatttgataaaattaataaaaaataccataagaaaagatcatacctaatgaagaaacatgaaaagtttcagatcaggaatgagacaaggatttctcctatcatcacttttttgaacattgtcctagaggttctagccagtgtcataaagcaagaaaaaaataaataaaatactttagaattagaaaggaaaaaataaaactcattttcatagatgatatgcctgtatggttagaagatttctgagatatgaggacattaaacaagaattaaatatattttatatgctaaccacaatcaaatgaaaataaaatgtccaatgatattttcaatagcatcagaaacaataaatgtatagaaataaaactaaacaaaaatatgtaagatctctatcctaaaaactacaaaacattattctgaggaaataaagaatatctaaataaatagaggaatatggtatattcatgggctgaaagatatactataatgaagatgtctactctcctaaaagtaatctgaaaagtcaacgcaatcccagtacaagtccctgatttttaaaatataaaattgtcaagctgattttaaaagttacatagaaatgcaaaggaatggggaacctgaaaaccccctggggctgggttctcacctgcatctggagaccttcctgagcccccagcaacaaaaccacaatgcagtgccactgcacaataactagaacagttaaaataaaaaagtgatggaaaacaccaagtgtcaacaaggatgtagagcaccctgagcactcatatactcctccagggagtttaatcagcatagtgattttggaaaacaatctggcagtatcctcaagctaaacatacgcatatatgaataagccagaaattccattcctaggtatatagccaatagaaggtgcacataccaaaatatataaaaatgttcatagcagcaatattttttatcaaaaactgacaactatataaatgtccatcaacaaaatgaaacattgtgaaggagtcaaaatgaactacagctatattaagtaatatggatgaagctgtttcttcatgtgggtgtgttggttatacagatatgtcattttgtgaaaatttattgagactcaggatttatccacttttctgtatgtgtgttgtactttatatgtcatataaacttttacagaaaaaaagagaataagggaggaaacaataatcttggatttggaaatgattttctaaatatcatagaaaaacctgaagcaataaaagattaccaaatttgactacataggcatcgaaaatgtctgcatgacaaaaatcctacaaataaaagatcaaaacgcatccaggaataaaatcacaaagcaaattgtagaccatgtgctaacattcttaatatataaattatttaataaacctaaaagacacagaccaattttttttaaagagagaaacatacagacaatttatagaaaaggaaatatgaatagatcttaaagataggaaaagatgctcaacctcattaaaaataagaaaaatgcaaattgaaatatgacatgcaggcaagcgctacagcaggctgccgtgagcactgtaaagagcaccaacgcgctgcacctcgactcccaccccacttagtcacaagcacatgcccatctgctcaaggcatgttctgccgctgcccagctcaggtctaagcacccagcaagtttgagatttttcgaaataaaataacttaaaaacagtgattttgacttccggataagatggtatatacaggtttctcccatctcccttcccattaagtacaactacaaaccgtagaaacaatacaagaggtaaccaaaaaagaattctcaaatgtgggaaggtgaactgctttgggattccagaactgtaggaaccacacagcagcagggctgtcccttcacccaactaaagaaggcaattagtttatttgacaaaaaatgtttgcctcttccaacacgccatcccacaacaaaaggcagcctaggtaggttttttcctgcctcctatcaaaaggtagttcctccaacaacacagcacttgagtaaggggggcccatcaggaattctactaacccagagaagtactctactcagctcctctctccctgctgtctggcattctcttcccctaaagagagacaacagggcagtcaggtggcatctggagaaggaccccaccataacaagcatcctggccctcgggccctgcaggcctgagacttccttctgccacccacagacaccagagtgagaaagggggaaagagggcaccagcaagaaatattccaatttgacaatcatccagcaagtagcagtctctgtccggcacaagcaggcaatcccgccacaagcaccccgacagggaagcctctttgtcctcatagtcttgatattctctccaccgcacaaggacaccagaaggcttagcctaaggaaatcccttcttctgccttctcaggcagtaccagcagagaacaatggaaaccccagtagtaccaaataaaactagaacacaaaaataacagctaaaagtctcttaaaaaattgccattggatgcacagcctacaaaattaggtcaggacctgtgtgctaggtctaaacagagtgactatctgctaaaattaaagatttaaacaggacctaaattccagtttatagttctgtaatagccaaaatgtccaagatacaatattttaaaactctacctgttataaattatagaactggaaagttcagtaacagaaataaaatctcactgaatgggctcattagttaagtggagatgaccaaggatgaaatcaatgagcatgaggacagatcaacaaaatgtagcctatctgaacaatgggagaaaacagactgagaaacaatgcaaagaacctcggggacctatgggacaataacaagagattcaactttcatatcatcagagctccagaagaagaggagaaagaaaataatgccaaagggtatttaaataaataatagtttaaaacttcccaaatctgttgaaaacataagcatatacaggttgaagaagctgaataaaccccttgcaggattaatccaaagaaatccaagccaagaaacatcataatttgattaacattacatatactattatactatatagcatgtgtatatataaacacacaaacataaatatatagagtaatatgcagttcaactccaaggacagtacgaaacaaaaaaaatgcattccaatatctctcatgaatatagacaaaatatcctcaatcaattattagaaaatagaatgcaatatgtagaaagaatttacataggccaagtggatttatttcaggtgtacaagactacatagacatttgaaaatcagtaaatgtaatctatcatataaatagaatagagaagaaaaattatatgatcgtattaattgaggcaaaaaacaaatttgataaaatccaacacccgtttatgataaaaactctcagcaagctaggaatagagagaaattgtgtcaactcaataaagatcatccataaaaatcttccaggtaaatgctttccttctaagattaggaataaagcgtggatgtctgctctcaccacttgtagtaggcaagaaaaagaaataaatgacacatatattgaaaagtaataaatacaaatgtacttattttcagatgtcattatctatgtagaaaactccctggattccacataaaaattcctatagctaatacatgagttcagcaaagtgacaggatacaagattaacacaaaaaattaaatatttttaataaactatgaatatgtgaaaaccaaaattaaaacacaatttaatttataatctctcaaaatatggaaatatctggctgtaaatctaaaaaaaatgtttaggagttgtatgctaaaaacttcaagcacagatgaaagaaataacaaaagatttacataaagttagagacatattatattcatggattgtaagatttaacatagtaaagatgtcaatcctctccaaattgatatacaggtttaacacaattcttatcaaaatcccagaaatatttcttagtagacatagataggattattctaaaatgtgtatgtaaaggcaaaggaaattgaatagctaacacaatttggaaaaagaagaataaaagtggaaaaatcaaattactcaatgttaaagcttattatttaactatagttatcaggttttgtatggtattaacacaagtgatagtgaaacagatcaatggaacagaatagagaacccataaatcagcccacacaaatatgtccaactgattttttatgaatgtgcagagtaactcaatggaagcaagactgtcttttcaacaactagttctgaaataattggacatccataatagaaaagaaaaaacaaactaaattcaaatttcacctcatatacaaaaattaacacaaaatagatcatggacttatatgtaaaatgtaaagctacatatcttctagaaaaaatagaaaacagtattcagggtctagagctaggcaaggagtccttagattttccaccaaaagcatgacacattaaaggaaaaattttagtttgacctaaccagaaaaaaaaaaagctctgccaaaagactctattaagaaaatggaaagacaagctgaagactgaaaaaaagaaatactgtttcaaatcacatatctgagagaactctcaaaacttaatagtattcttaaaagtccaaaaacatgggcaaaaactaggaaaagacatacaaacataaacagaaaatgatatataaatggcaaattaacacaggaaaaggtgttcaaaatcattttcatcagcacaatgcaaattaaaaccagtaaaatgctacaacacatctatcaaaatagataaaataaaaatagtgacaacaccaaatgctagggaggatacagaaagactggatcatgaatataaaactggtcaggatataaaatggtacaactgctctggagagagtatagtcgtttcttacaaaattaaacatacacttactatatgacccaacaattgcacgctttggaatttatgtcagtacaataaaaacatgttcacacaaaaacttgtatgtgaatgttcatagactatttgtaatagccaaaaactggaaataccccaaatgtcctgcaatggagaaatgcttacacaaactgtggtatatccataccatggaatgctacttagcaataaaaagaaaacaacaatttggtaaactctccaggaaattacgtttaattttttaaaaagtgaaatccaaaaaattatatactgtatgattccatttatataacatttttgaaataatattttagaaatggggaaaagattggtagttacagttggagaatgaagttggagaaggagcagaagagaggtgtgtgtggttatgaaaggataccaagaaagatccttgtggtggaggaactattctgtattttgactatgatggcagatacaggaacatgagataaaactgtgtagaattaaactcagatacacaaaacaaatgaatacaaataaaactggggctatcattaagattcatgggttgtatcagcatcaatatcctgattgtgaaactgtgctgcaatttgttaccatggggaggaaccatgtaaagggaaaacagcatctttgtgtattttttcttacaactgcatattgtaatcatacataagattttaattaaatggcaaatcatatttgtacaaagatcaaaatacttaataaattatgtgtgtttgagaatggctaaataggaatttctgatgataatttgtactagttatatgctgggtaattttttcaatagctctcaaagttgaaaattgtgaatcacatactttgtgttataatttacctgtagatattattcaatgtgtggaaatcattattatataccataatatttatttgagtattttaaaagcaaaaattagacagaaccctaagagccaaagtaggggacgaggtgaattattacacctatgagagagaataatatgcagctttaaaatatatatatgtacatatatatacacacacaaagaaaatagccaggtggatagatacggaaaggtgcacaaatcatatatatgcaaatttttacatatgtacctatatacatataaattatatatgttatgaatgccaaggtgacttgttaaatgatataatcaagatgcagcacaatgtgagtagtatgctaaaacttctgtttaacatttttttctatacgcacatgtacttctgaatggacataaaagaaactgataactgttgtagtctctaggaagagaaactggctgtcaaggaaacaaaggcagaagaaatactctttttagtatattttgaattttgtaccatgttcatatattatgtactcaaaaaacgaaattattttctttaaaaataagcatggcaatactatgcacaaatatatagttgtgaaaaagagcagtgaactgagcatctaaaatatttaggcccagtaatattatgtataaatggcagtgtatatgacaagtacagtctgttttatagatggcaaagtggagactgtgacttactttggactagaaagtcgttacttcggcatctgttttacagattatacttgtcatacgcacttctctgttttatcaaatcaaaggcactattccatttattcttttttttttttcaagactgtcttgctctgtcacctaggctggagtacagtcatgcaatcttggctcactgcaacctctgtctcctgggttcaagcaattctcaggcttcaacctcccagatagctgggattacaggtacgcatcaccacactgtgctaatttttgtattttagtagagacaaggttttaccacgttggccagcctggtttctagtgcctgatctcaagtgatctgcccacctcggcctcccaaagtgttaggatcacaggtgtaagccaccatgcctggccaccatttattcttataggtagaattttgcatgtctgtctactcattggaatatcagattattagaggtgaaagaaactgaaagtatcttattcttcatattcttacagttcctataccatgtagaaaaacagaacaatggtgtagaaaaataatctatagaataaaattggtcacttattctggctatccatgtactcttacaaatgactgttattctaatataataattagtaaatatgaaataaattccaagaaaaaatgaacataatattgaaagaaagacaaatagtaatatctttaagtgactttgaactagtgactttgatatcataactacatgtcttccaagtataaaatttattctggctatatagcttctaagagggagatctcttgtctaacccccactctgagttctagacttacctaatttcatatttgactctccacttgaattcacacaaaagcttgtattcatatattcatagaatctttattcataacaacccaaaactggaagtagcccaaatgtccttcaatggagggatggttgaattctttactgaattacaaaaatcaacacgtcaaacagaacgcatcctctttccaagcatgctctcacagtgtttcaacgtagtgaacagaataaaaaccatctagttgttcaaaccagaaatgtgagaaccacattgatttctccttcgcttcaatccactctctttaagtcagtcatcaagtctctgaaacatccctcaaattcacgtctctttatccacactgccgctatcctggcccaagtcatgattgcctttaaacttaactacttcaaagcagccctacagttcttttcttcccctactctcaagccatcttcatagtgtaaccagaatgattgtttaaaggcctgcgttacagtataaatttctatgtgaaacatttcagtaccttccaactggacaagcttacaaaccctccatgaatgtctgtggcttatctcttcagtctcaccttttatattacttggatgtgatcctactggatatcttccaattcctcaaatatatcaaggtgtcccttgacagggacttcattcatgcttgtcctccctggatcactctttacttcccctgtccctttttttttttttttttgagacagagtctcgctctatcgcccaggctggagtgcagtggtgcgatcttggctcactgcaagctccgccttcccggttcacgccattctcctgcctcagcctcctgagtagctgggactacaggcgcccaccaccacgcccggctaattttttgtgtttttagtagagacggggtttcaccatgttagccaggatggtctcgatctcctgaccttgtgatctgcccttctcggcctcccaaagtgccgggattacaggcgtaagccactgtgcctggcctcccgtcctttaatgtaagaaaatatctatttatcctttgggtttcagcctatctcaaattaagttagaccctattatgatacccttctataggtttctgtacttccatttgtctgataatcattattatccttcttcagctactttctcctatcattaaactctagatttattactcattactcactagtcattaataacttcaacccttcatgatctcagtaataagcatcctagactccaactaccaccaggtaaattcataatttactctctgcaataccacaaatcctataatctttatcccctaaattacagttattctatttcatgttctttactactctcatgtactcacactcctccttactcatcttaagttccatatgcatatttatagtcactttatagtagcatatatccttacatcccttgaccaatttgtgcttcatgtctttacctggaaaaagtcaaaccactctctacttactccgcatctaaacatttgcagctgaacacgattggaggaaaatgcacctgtgctcacttgcctagatctaaattcattaatactcaactgcattgaaatcttgggaatgccattgactcagccaccaggcccacccacctgatgacccaagcactaagccatcctgcccaggactccaggaacaaacctacttccagaccacgccatatgacctgcccagaatctctggataggctgatgcatgaagggcgttccctgccgaaacagtctgtaaagactggaatatatgcctatttcttcagatgcacagacaccaacgcatgaccacaaggatcatgagcaataaaaaaaaaccctgaaatcttagagatgccaatcaattacatatttccctttctctttacagcccatacctctaactcttctctctcatcctctctctcggagagtgacattgtttcttttattttggaaaagtaaaggcagtcagaagagagtatctccaagtttcatcctagtatctacccacagttttgtaactgtgttcatatactgtgcattcgctctgtttctaatggtttcataattgatactcctgatgaagaccacctcttccacctgtgtccaagaacccattctctctcatcttctaagaacactgctccagttattttctcatctctgtcttaaatcatgaaaattttcctctcctgtactacctttctacctccattccatttctgtgttcccctttacaattaaattctgtaaacatttgcctataccagctgtttgcaatcctctttccattccctcctacacctataccaattaaaattttaccctcactcttctaccaaaatttcttttataaacaacaccaataacaattacattaacaaatcaaaaaatgaagattcctccatttttatcaaaggacatggcaacacagaacataaacatgtatatttgtagaaaaagtaatggtttttagccaataggtacaggtttttccacaattcatttttggcatgacctgctctcaatggcattaataattcttattgattaattagcatcagtaagtagtattgaatatttaattataagattggtgaattgacacaaaaacctaggagctgtattccgtgggtatagatacagaataaatgttcaaagtgaaattattgatagtggagagaagagaattaatttcaggaatcataaacatagctgaaggacattgtaacggatgcatataattaagggtttgggatgtacgcttgtgaaactacataagtaaatactttatacaacagtttcgaaattattttttcctaaataattaacaccatccctcttctactaaaaataatactactgcaaagttatataattatctaacattaaatacaatctaatatattatctaacacgaattggaatctgctacttttatgaaaactgattgtgatagatactaaaaggttactcacctatttttttttacttctccctcacttccttttccctttatttcgtctctttgtaacacaaatatacacacactaccactatctccattaaacagtcgtacacactcagacacttaactataacatacatctatacttgatcatagagtctgctgccctgaaaccaaaaaaagtccaaaaaaagcataagtaaatagatcaggaaatttgaagcttccctcataaatgttttatgtaatgagcccacctgttgcatcctgtaatcttcatagcctatattcaaagaggttcctccgtcactctaacccactcattccagtgatctcaacctcttttcatcaagagtttttctctactatcataatatcatttttctatttagtctaagccaattttctctgcacattcctttgcacgtatcttagtataaatataatttttgtgtcaaaagagttatccaaatatcatagatcagatgtatttattgtgtccttgaataaagttatcagagaaagttctgactgctcaaaacctattataaacacccttattgaaaacaacttacatggaatctaagcaaatctcatgtcttattatggacagaaaatgaacaggctaaatcttctcagtaaaccttcccagtagcatcttgagcattaacactttgggattttctctccaaggacttattctctttatatttctcttcccctgtgtatcagtttattccttctttgatgtgcttatgagatcactacattgatttaagtaataataataaatttttggcagagcccttcattagtcataagaaaaaaagagtgatgataatataaaagaaagagaagacacagctcctatccttgagaaatctaacatctaatgaatctgaaaagtaatatcacttagaacaatataatgaaaactaaaaatgattaattataaactgaggtctacagatattgaaatggaaagatttaagcaaattatgatcaaacagggaagactaaacagtggagataaatttggttaacatacttttagggattagtgtttatatagattcttggaagagacaactttatgtatggagcccattgaaataattaaaaacatctaactaaagtcattatttgtactattatgatcaatgttctttcttactgtgaataaagaaatggtaaatttcctgagccctatgttaattcatgaacaaccaataaaatcaattttatgatttactagaaatatctccaaagttttaatttcaactatcgctgttactttagggtaagtgtcaaagacaagtcatgttaacacacagattagttgtaggatgagactcactgaaatagctcttaggaaactgggtcttagacaatttagttttcaacaaattggcctattccccttcaaagtcccatacaatggagagttatgctgccaatatggccatgaaagctccttagaggaataaaatgcaaaataaataaaacaaaaactaaacatcctagagaatgattaaaagcaagcatatttgtgagtggaatcaaagatagaaaaaagggatagagaactaggtggggttttttttcctgatatctgtatctttggtacagttcttattcataacctaaattgttttcctgatttctttgtataatttttaaatactgtctggtatctcactgagctgttttagtatcaaaattttgaatactctgcctgggattgttgacatttcttttttattgggatctgttgctggagaattattgtgtccttatgttgatatctgcatatctagtataacagttacttttttaaattttttgaatttgctctcatggggaggactttttccagaagatgtatctaaggtgtagtttgggtagggttctctggttttgattctgggtgtgtacaatagtgcagtctctgtatgatttcttcatctgtaaacagtgtcagtggtgtctgtgatttctttggtggcttaggatatggttgttagtggaggctgtgctgaagtcttgctaagaactgagatgccagttgggccagtcttcggcttccattggtagaatcagtgggatgagcatgtgtgtccttgggccccagggcagcatacactggcaccaatgttagcgggtttaggcaagacagttcttgtgcttccaagtggcttgcttggcttctgggaatggcatcagtagttcaggtatgaagttgaattcttgagccctttggcagtggatgtggtgtgggtgatggcagtagcagtggtgggacagccctctgggacccgtgtagtccatgctgatattggcaatggctgtgacaggttgggcaggtcagttcccagatccacaggaggcacatgagtgtggatgtcagctgtggtgccaggggaaggttgagtggggctgacctcagatcccaggaggggtgctgaggagctaccagtgatggactgggctaagtgaccctcgggcccctgtacggtgtgctcagattctgtgggtgggtgaagccaggctgagtagaccttcccatgggctccttggtggtgtatgaggcactggctatggtaggcaggggcagggggatccccaggccacagatggaatgctcagataggagtggtagtggctgttttgtggtcatggactggggaggactgggttgcttttcctgggaacaaccataggcaagaaactggggaggcatgggctttgctcatgcctctgccccacagtagttcatcatggcagcagttgcaggcagtgaaatttgtcctcagggcaagtaaaaatgtgtcgttgtccctctggtcggggtaacgggaggtgggattactccctagggctcttgcctcggtctcagaagcagagtaagatgcagtgcgttgggatctgtgctgtcaaaatggtgccgtgctgcagttagttaggacttagggttcgtgggacccagtgtgaggttctttcttgggtagcgccttcacgtggtctccaggcagctccctatgttagtctcaggggctacgatggttgaggggatctcctgtggctagaattgtaggtatctgtggtgaaatgtgggctgctgggagtctccccctttcccttttcccacattggagagccgctcgagactcatatccgatcttggttgaacaggcggtctcatttccttctcctttgcttttggtgcttcctggtcacttctctgctgactttcggtgttctctcttagatgatctattcaacgtgtgattattgactggttattttggttactttacatggaagggccaagtaccagatgtatcaagtcagccatgttggagcctctccagctccattcaaggggcctgttttgagttggccctaggcctttccccgtaagcaaactttctataacattgaaattacttgggaaaaaaagctgtcaaaagactttgagggtgttttgttttgttttgttttgttttgttttgttttgttttatggcgtctcacgctgtcacccaggctggaatacagtggcaatctctgcctcccaggttcaagcaattctcctgcctcagcctcctgagtagctgggattacaggcgtacacccccatgcccagctaatttatgtatttttagtagagatggagtttcaccatgctggccaggctggtctggaactcctgacctcaagtgatccacctgcctcggcctcccaaagtgccgggattacaggcgtgagccactgcactcagccaacttggaggtattttggggaaaaaaaagaagtaatgatttttcctaacttatgagatattaagacctacaataacatcatattacttaaattacagcttattcaatggaaaaaatagtaagtggagaaacaaaccatgtattgaggggaacttggaatagtataaagatggcctcacaaatcgatgaagaaggaatggttagtcggtctacatagagacaaccagaaccaagactagctgattatctcacaggatatgtaaatataacctctagaagactagagtcctaaatgacaaatataaaactctaaatctaattaacagaaccagttacataatctttaagtttcaatgcaagataaaaaatgataaaattgaagtgggggacattttgaaaaaatggaaattacattgcagtgatccctaaaactaaagagccttattttgaatcctagtttcacaatccattgcaaggaaaaggaaactttacttaaatcctttgagccttggttttcttgtagtaaaggaataattttaatacttttacattgggtttttgtgagaattaaatgagctaatatatgtgaagaactcagaacaataacttatacataatgagcatgcaataaatgttatttatttataatatattagcagtatataaaataaggaattatttgtatgtggaatggctcatacctataatcccaaaattttggggggatgatattggtggattgcttgagaccaggaattagaggctgcagtgagttatgattgcatcactgcactccagcctggatgacagagcaagactctgactcaaaacaagaaaaaaaattaaagatttaaaaaaaaaaacaaaattaaaaaattaaaataagatattattgtgataaatatatataataaacttttgccaagcaacaaaaatggaaactcaatagaaagatggaaaaaatacatcatagttacaactgttagtagaatccttggattgatggaaggtcacgcatagataccctggtgtaattcagacagaattttcttacctaaaaaatagcaaaaagtaatgctacacattggtaagaccaaaatccttatcccaaacagagaaaaatgtgagcttttggaccccaaaattaattatttaaaataatttagtattattagcaacagtgaagagtaagatgtagaaggtacaaaagtaatactatttctctttatgtctctttctttggttttcatagaaccacagtagaatattaaagataatcatctttctgtactgatcaatggaatgtgggtgaccatatttattaatttttattgccaattttctttcactttatataccaaaatattttccaagggagccctcaagaagagaaagtgaatctgaacctctaccataggaaatgaaaggaaatttgactaggaaaaagtattttaaataaacaaataaatattttaaaaaacagtattgtgaaaggtcaaataaaatattgggttactattttaaagaaaaaatccagcaaatatattaagctattgaaaactgtcttgtccatggttatgaaaccaaggaacaaacatattaagaaaaaaagataagaagaacgacaacaacagaaaagtggaattctacagagaaattccatatggctatccccttatgctgcaggtgcagagagacctcctgtttattctcacgacaatccttctcagcacccaggggacagtttctctcaggtttttatgtctagagatctgcagctcattggaaggcaggcagattttcagagaggaaaagatttttgaagataatttatgctgcaatcccaacatcaaccatcacttcaaatatttttctatttataatcactgggagtataaatctgaaaagctcttttacctgtgattctgaactctcaatccgggtgagagaatagaataggagacaggttgggaagctgctcgtattttttatctgttaatgagtgacctgactgcttgcgagtattaaagttagatgcccaggatttagagctggtttcctatttttatgatggagtcttcattgtagttgtagattatgaaagcattttgttttccgcacttttattgccatatctccttctctattcaacatgcctggctctctagatattcgctaaagcaaatctgaaatccctaaatattgaaattgcagtgaaagaaatattttcgtacagagaagttggctaaacaacattctttaaacgttaggaaaatgttgttttattatttattattttttaaattttctttttaccaaatagatttttgatacaattttattttatgggtcagagaaccaaaaataatattttatctatcatttgtacttttaaaagacatggtaaaagttttgaaaaatatgcaacatacatggctatcaaataaagctactttaaattgtttggaggcagtccttcatggaggtgtggtaaaggttagataatctctcaaaatttcctctagctgtaaagccaaatatcctatgggctccctagagatgtttcctagttcattattttttttaactttagtcacaccaaatccttttcttctctcatcagcaatttttcaacctcgaattattccccatttataggaaacactctaatgtctgcatctttcttctgatttcctattggttcttattcttttctaagtgcctgccatttctatggatttcccacacattcttgcttcttttctcctaatatgcaaaagttaatccactacatttgtacaagaaaggaacaaacaggaagctatttcacaaaattatgtctgcttttgtcagtgcacctatagaagataatcccaagtactttgcaaataatgttagaaaaaaccttcaaaatatatttctgcctttcagtaaacagtataaatttagtcaaatattaaacctcattataattatcttacttataatccctcatgtgttttaacagttactgaaaaaattctattatttcaattctgcaaaagaaagaaaaatgaatacatttctttcatagaaaatggaaattttatctgatggaaagaaggggcaaatagagaaaacacattttacaaatgaaaaaggctagaaatgtgtggcaactttggagagaactggtatgaagccaacagacctctgggttgatggaggagaacctgactgtcagtgtcacattgatgaaactagaagaaaagagaaaattcacttggatacaatgtttcttcacatctaaaaagtgagcttatttcaggcaaaataaaaataagacttaagaaaatgcatcacaagagaagacagaactttcagtggtctaaattcttagatactttagaagaagacactattgggtaaaatgaaggaagaattgttgagtctattggaagagtttttcttattcagagattcaggggtgtgaaaaaggaaaaagtctcagtgcaactggaaactaaaggaacaataacatttgtcatcaagtaagtaatttgggatttactttgaaaaaatttaaaggcttaggtagaagaaactaagcacattatctgatatagcagtgataaaacttcaaatatacctcaggctaatatttgattgatgtattattttttcctttcccagtagagctccatgacattgccagagatgtgggttagaaagagatcagtaagagaacatctccagcctcatctacgttctaagatgagaacaaaataattactactattttaaagaggtttttatatctctttaaagactttgtgattataatgagttcatttttatcttcctctcttaagtcaaaaaatttcaggagccattttcctgggtcaagagatatccaagtggtggtgcacttaaaaactgccccctattaacgctgacttgggataggaaaggaaagttgtaacagaatacggatgtattcttctcaaccagagaagatgtaagttagcaacatgttctaaatccccagaagaaagaaatacgttaatgataaacttaattttaaaaagtggttaagtcatagtccataatatgcatgaatccttaatattgaagagaccaacagctaagcttctatacaacttctgaggtttggaagaagtacaacagtactctccttccaagtatctttggcttggtgagaaaattctgagccggaaggattctgattgcgattagtgttccatagattattttgtcttttgtctgaagtgatgctgaatacaacctcagtcaccgaatttctcctcttgggagtgacagacattcaagaactgcagccttttctcttcgtggttttcctcaccatctacttcatcagtgtgactgggaatggagccgttctgatgattgtcatctccgatcctagactccattcccttatgtatttcttcctgggaaacctgtcctacctggatatctgttactctacggtgacactgccaaaaatgctgcagaactttctctctacacacaaagcaatttctttcttgggatgcataagccagcttcatttcttccacttcctgggcagcacggagtccatgttgttcgccgtgatggcatttgacctctctgtggctatctgcaagccacttcgctacactgtcatcatgaaccctcagctctgtacccagatggccatcacaatctgggtcattggttttttccatgccctgctgcactccgtaatgacttctcgcttgaacttctgtggttccaaccgtatccatcattttctctgtgatattaagccattgctaaagctggcctgtgggaacactgagcttaatcagtggctactcagtactgtcacggggacaattgccatgggccccttctttctgacacttctctcctatttctacattatcacttatctcttcttcaagacccgttcttgtagcatgctctgtaaagcactgtccacttgtgcctcccacttcatggtagttattcttttctatgcacctgttcttttcacctatatccatcctgcgttagagagcttcatggaccaggaccggattgttgccatcatgtacactgtggtcactcctgtactaaacccactgatctatactttgaggaacaaggaagtgaagggggccttgggtagagtgatcagaaggctttgatttgaataaaccagagaactctactgaggcataaataaccagcaatgaaaaagtagagatgtgtaattttactgcttctcagatggtttataagtgtaaaatagaggcaactggataaaagaaaaaaaagtccaatctagttgtagtaaacaatacatttctaagtaatatgaggaatacttgaaaatgcaagacactagccatggaaccctaatgctgaaaattttttggaatatcagttgatgtaattgacttattatgtattctaacatgtacttgtatgcaattgcatgtagaattttgcctatattgcccatgtattgtatagatagatgatatttaggactgtttgtctgtgagatccttttagtttaacacattttagtctgatcaataaaattattatgcttttttattttaaggattgtcatgtagggctatgtttattcaattggaaaagtaaatgctaacttgcatattatttaaataaattttaaagaggtatgtcatgatttcttttcagttcggttggtttttgttcttttaatggtgattcaaaatgcaaaagacatagaaagatgtcaaatgtttctccccatctctgccctccgtcactgacttactcttcatatacaatcaatttaatcagttgttatctgtcctcacagagatcctttatgctacacagtcaaatacaaatattttctttaaaaaagaatggcaatgaacaatacatgttatatgagcaaaccaatgttgagggcaatgtgtatcttggagatctttccctattagaacatagagcttctttatttttttaacatgcatggtatatgccactttgttcatgtattatatttgatagatcagtctcctatcattggacatctatgttatttccaatcatatgttgcagtgtataatcttgtgtacacgtcattctatatatgtgcaagtctatttgtaggacaaacttccagacatggaaatgttaggtcaagagatatcgttattgtaattcagatagatactgccaaattgccctccccagaggttataaaaaatttcatcaccacttgcaatgtaaaagtgtttagattttacactacattgaatatgaataatgccaatgacttattttgtagatgcttccctgaaaatattctacttttacagcctggttatgtaaaaaatgacatcctaaagacactttccataacatggaagtctgcataattctgccattgttatagaaagttttcagactatttgaagcccaagcaagatggcaactgggagaaaggaaaagctaagattacagcaattcttgtcattgttagctggcacacaggcaacatgaagtgttttcccctacttcagcataaaatacttaaaactttcctcttactacaccaacagttattcatgtgaaaaattaatcaattgtgttgtttattattttaatcaaaaaaagctctacaggtgttagatttatgaaagtcctgcacaaaataaaggaaaggtgccctaaaagacccaccgtttaactaaagaaaatgaatctcacacagaggacatgctgcagagagaatgagctactgaaacacactagaatgtttcatttcttttatgacacaaaaagaataggaaagagtggaaaaagggaacaaacttttactaaaagttgacaattttatttttacattttataatacaaatgaaaaatgctttttacttggtccagagaggctaataagtaattaaattgaatgacattgcaaccactaattaagagataaaacaaccaattgttcagctaagagttctggtacctatatcttcagagatgttttagaagtcaactggccagacttcaaggattactatgaaataccattaaaagtggagctaggtaaaacaaacaaacaaacaaaaaacacctcaagaatcactttgtatctcattagagtgttataaccactcgtatctctccacccttggtcatgaaagatgatgactttaaacactctattattttggtttcgttttcctttatctgtccttattttgacagactgtaatgcatgtaatatgatgaaatacaggtgaaatacaaaaaattcatgaaaatttatttttcttttcctttggtaccaaactcatactaagtgaaaacaatgaaatcataactgtggaagtatttctggagctaatagacaagaataggtatgatgtttcttagtttctaagtacttagaaatggattctggctctgaaaagatgtggtatgccaacatttgtaactatttagagatacaaatagacaagactatggaagctaagttgagcgggtgggctgactattcaaaacctctgccttcacttttgcaaacccaaacgatctgacctctctctggtacttcttctatcttccaagtcaaccttctttggtccttcagttccagttttgttgatgagagaatgcctgtgtggagaagacactatccacctgaactatctcagactatcacttctgttgctcagagtttattgcataatcccatctacatggaagctgtgaactgtaggaaaacacatgggttctagttatctactgctgcataacaaatagtagcctaaatctaaatggcttaatttatttaatcaaatcccaggattctgtgggtcagaaattggggagggcacagcaggaaagggttgactatgctcagtgatatctggatctgctctctctctctctctctctctctctctttctctctctccagtttctcagttgactgtcatgtgcttctttaacagggaagcctcgggacagactttttcatgggggacagcaaaccaagacaaaaattgttagttgtctcaaagacaaaaaccaagaaccagcattaacataacttctatcatactctattggccaaagaaatcgcaggccaactgagcttctgtaaccttcaatggaaagagtgtcaaaaattgtgtggacatccttaatctaccacagtcccatatctaaccactaataattcatgttgttcccatatgcaaggtacacttactcctcttcctaataatcttaaaatctcatccctttatagcatcagctcaaagtctaggtttttaaaatccaaatcatgacaaagtgcaaatggggcatatttagtatgattcctcaagaatggttccttttgacctgaagacctttgaacttgaagaagtcaggttatcttcctgtcacacactcagcacataatgataaagtagatataagatgacagtaatagaaaatgttactccaaaagagaaaaaatgggaggcacataacagttacatagcaattgtgaaacccatttggggacatttttctcactccgtcctctagagtctaagatgatgcaattgaaactgatgataccaataaaattctctctcttcttcttcttctttttttttttttttttttttttttttacacggatctcactctgtcacccagactggagtacagtgggacggtgcaatctcggctcactgcaacctccacctcccaggttcaagtgattctctcaactgagcctcctaagtagttgggattacaggcatgtgccaccatgcccggctaaattttgtacttttaatagagacagggtttccaccgtgttgcgcaggctggcctcaaacccctgatttcatgtgatccacccacatgagcctcccaaagtgctgggattacagatctgagtcactgtgcctggcccaccaataatattccttttaaaatattttaggttcttaggattcttatttgggtttagtcaattagataagtaccacactcatacatctccttaggacaggcctttctctgacttgggctgacaattagtgtactgtgagacaacacccttgagatttctctctgtctgtcttcatgccagtagaatactgttttatttactgtacctttgcaacatcttgggaagtcaagaagagtgataccatctgctttgctattctttctgaagatcacttgggctatttgaggtctttcttgaatagttttttccatttctgtaaaaaatgcttttgggattttgatagtgattgcattgaattcatagacaagttatggtagtgtggacattttacaattttaattcttctaagccctgaacataggttatgtttctatttatttgagtcttcttcaattcctttcatcaatgtttttacagttgccagtgtacaagtcattcacttccttggttaagtttattgctaagcattttattcttttttatgctattttaaatgaaattgttttggttcttccttttctgatagctcagaaaagctagattgttaatgtataggaatgcaattgattttgtatgttaattttatattcaatttgaatgccttccatttaattaaaatagtatagtactgagataaagacagacatacaagccaatagaacagaatggagagtccagaaataaatgcacatatatatagtaaactgatcttggacaagattgctgagaacacacaatggagaaagaatagtcccttcaatagatggtgtagaataaactacatagagaagaatgaaattggaccctatctcatactatatacaaaatcaactcaaaatggattaaagatttaaatgtaaaactcctagaagaaaaagaataaggagataacttcttgatgttggtcttgacaatgattttctagatttgaaacaacaaaataaaaaatagacaagcaggactatgtaaagctaaaaagcttcttcacaacaaaggaaatgatcaacagagtgaaaagtcatcctatgaagcgggagaaaatatttcaaaccatctatctgataggggttaatatctaaaatacataataatcttctcaactcaataatatatacacacacacacacaacttaaaattgacaaaataattgaataggtatttctttaaagaagacatataaatggccaacaagtatataaaaacgtactcaataccactaaccatcagaaaaaggcaaccatagtcagatatcacttaacatattttaggatggttattataaaaaaaaaaagtgttggtgtgaatgtggagaaactggatcccttatacactgaatatagaaattgcagccactatgcaaaatggtatgaaaattcctttaaaaattaaaaataaatctacaatctgatccagcaatttctcttctgggtgtatagccaagagaattgaaatcagggccttgaagaaatatgtgcaacactctgtttattttgaaattttttacagtagacaaaatacaaaaacaacccaagtattcattggcagatgaatggataaagaaaatgaatatatacatgaatattatttaacctttaaaagaaggagatcctgccaattattacaatatggacaaacctagaggatatcatgataagtaaaataagacagtctcaaaaggacaaatgttgcatggccatgcttaagtcaacctcatagaaatacaaaatagaatggtgattgtaaaggaatgtgtagagggggagatggggaattgtttatcagtgggtatggtataaagttcctgttatgcaagataaataagatctagagatctgcagtacaacatattacctataactagaaaatagtattttgcactttaaaatatgttaacaagactatagatctcatgataagtgcttttacagaaacaaaaacaacacaaaagagcatgaggacatttttggaggtggtggatatgcttactaccctggttgtggtgatgatagtatgtgtacatatgcccaaactcatcacgatgtatacattaaagacatataatttttttatgtcaattgtacctcaataaagctaaaataagatttctggaaacatttttgcctctagctggaaatgttgacaaggcatgtccataagactcgtagtgacctctgtgtctaacatagagggcttaagaggcctgtcttaagatttttagaaactattctaggcttccccattatctttctgagctttcaacaatgggtattatagtcacatccttgggatctttacctaaaaaccatacttcactaacagcaccttggaatatgatctttgccctgaagccatttcttactttgagaaacttctaccatctagactatttagcactaatatacagtttaattttttgatcctaggaagtcctggaatctagttttcctctaaatactgattgaaaattgaatgccttgttttttagttcatcttacgtctgccctattttgtaatagtcagctaaaagaatctgttggaactttcactattttgatggtttttatgtcagcttgactgaggatgtccacactttatttaattgagcagttttctggatgtgtcagtgaggatgtttttagatgagactaacatttgaattgatagattgagtaaagcagattatcctccctaatgtaggtggccatcatccaatcaatattctgttgactctgtttctcagaagaaccctgactactacaatcattcttcctagtaagcaccttagcaacatctgggttcaatagatatcctttctatcttctttgttactgtggatagtacatgtctactgtactacatattactatagatagtggatgtctctcttgaccgccaggccaacaattagagttaaatccccataaattaattagggttgtgctagagatgttaaaatagaaaagagattaaactgacaggagtgcaaatagtagttacaatgtgccagcaggagtaccatgggattgaattttgagtgtgcatgatcaagggactagaacactaaactgggtaaatgagaatatattaactaggggacattgaattcttagacacggaatctggggcttaagtaaatgtgctgctagtgtggctcttacaagcacagggaaggcattggcccatgatgatcaaagttaaaattactgagttgccctgacagatggtatggaaaggaataaagagactcaggaaagtgggggtattggaagaatatactatatgtaggtcagaaaagccaccagaatattatgttccacaagagtactcagaggagacacaccattcacaattcagaatgctctggcagaggcgttctggaattactaagaaattcagtggtgactctttgtagaccagggataatggttacagaagtaatcacagagtttgaattgctggagaaaaggggcctacagcaataaaaatatatggtagcattgaaccactggaagctagtagttggcaattgctgtaatcatcagtgagtcaaaaaggtagccaagtagtcttgacctacaggaagctgtggtgatggttaatataacatgtgtccctaaagacgaaattacaggacagctgatgaggttgctgcttaaaaactacaatcaaaagaaggcaagagtagaggaacaggacactgagggtggtctctctaataaaatggcctaatttcctgctcagttcacagacgcaagctaatatttaggtgcataacttattacctgaacatttagtcatgtcctccagaaagaagtgaacttcaacattgtggtaagcatttactggaaagacacctatagtttttcccgagagggagctaacattatttatgcaaattactgcacactgggaaagggggaatacccaaatatttcaagtacagttgtctgagttgacaccgatactccaagagccaaagcatcaccatggcccaaatgttacaatgagcatacagaagccagattacgaatggagtcatgttaaagtttagcttacagtacgtcacccagtactgtaggcacatccaatagtcgttcccacagtcactggctatacgattaggactgatatacttggcagtaagagaagcctctacatcagtccttggccagtgggaaatgcgctatcgtactggataatgccaactggaagctttgaaactgccccatctggcaaggatattaaactaacaacaatatcacatcctgggaaggatagccaagattagtgcccccttaaatatctaaagactgaaagatcacttgcaaaaaacagataaatcctgaatagctgcagactagtagtcttgatcacagctgtcatgtcagacatggtatcattgctagaacaagttaacagggcttcaggtaaatggtttttgtccattgatatggcaaatgcattcttgtttcttgggagcatcccaagagtgactgtttcaggagatctattaagaagttgtaaggtttcttttaacgtaccttcgaagttccagaacatcatttttgttgcattctattggtgaagtcactgtgccagcccaggttcaagaaaaatgaaccacacagggcatcaatgctgagaggcatggttcacttggcatccatgtgtctagactagctaccacattgacttgagactcattttgatagtcccgtctgaagattaatgtatttgtttttacctagcaaaaacatacatggtgcattgtatgtgtcagaccctattctaagtactttatacatattagctcatttaatcatcgtaacaacctttattcttattttacagatgaagaaatacaggaacagaaatgttaagtcatttgcccaaagtttttccgacagtgattagcaatgatagatgtaagcccaagcagaatggctacagtcattttcttgaaaattacactgtgctttctcagctgttacatctttaaatacagaccattctctttgtgctctttttctggacctcctttctaacagatgtgctgggaagttcacaacgtatttcctgcaatcaggcaagagaaagaaataaagagtattcaattaggaaaagaggaagtcaaattgtctctgtttgcagatgacatgatcgtatatttagaaaatcccatcatctcagcccaaaatctccttaagctgataagcaacttcagcaaagtctcaggatacaaaatcaatttgcaaaaatcgcaagcattcctatacaccaacaacagacaaacagagagccacatcatgagtgaacgctcattcacaattgctacaaagagaataaaatacctaggaatacaacttacaagtgatatgaaggacttcttcaaggagaactgcaaaccaatgctcaaggaaataagagaggacacaaacaaacagaaaaacattccatgctcatgcataggaataatcaatatcgtgaaaatggccacactgcccaaagtaatttatagattcaatgctatccccatcaagctaccattgactttcttcacagaatcagaaaaaacaactttaaatttcaaatggaaccaaaaaagagcctgcatagccaagacaatcctaagcagaaagaacaaagctggaagcatcacactacctgacttcaaactatactacaaggctacagtaaccaaaacagcatgatactggtaccaaaacagatatatagaccaacggaacagaacagaggcctcagaaataacaccacacatctacaaccaactgatctttgacaaacctgacaaaaacaggcaatggggaaatgattccctatttaataaatggtgttgggaaaactggctagccagatgtagaaagctgaaacacgatcccttccttacaccttatacaaaaattaactcaagatggattaaagacttaaacataagacctaaaaccatagaaaccctagaagaaaacctaggcaataccattcaggtcataggcttgggcaaagacttcatgactaaaacaccaaaagcaatggcaacaaaagccaaaatagacaaatgggatctaattaaactaaagaacttctgcacagcaaaaaaaaactatcagcagagtgaacaggcaacctacagaatgagagaaaatttttgcaatctatccatctgacaaaaggctaatatctagaatctacaaagaacttaaacaaatttacaagaaaaaagcaaccccatcaaaaagtgagcaaaggatatgaacagaaacttctcaaaagaagacatttatgcagccaacaaacatatgaaaaaaagctcattatcactggtcattagagaaatgaaaatcaaaaccaaaatgagataccatctcacgccagttagaatggtgatcattaaaaagtcaggaaacaacagatgctggaaaggacatggagaaataggaacacttttacactgttggtgggagcgtaaattagttcaaccattgtggaaaacagtgtggcgattcctcaaggatctagaactagaaataccatttgacccagcagtcccattactgggtatatacccaaaggattatgtatcattctactataaagacacacacatgtatgtctatagcagcactgttcacaatagcattgacttggaacctacccaaatgcccatcaatgataaactggataaagaaaatatggcacgtatacaccatggaatactatgcagccataaaaagggatgagttcatgtcctttgcagggacatggatgacactggaaagcatcattctcagcaaactatcacaagaacagaaaaccaaaacagagaaccgcttgttctcactcataggtgggagttgaacagtgagaacacatgcacacagggaggggaacatcacaccccagggcctgtcagggggtgggagggtagggaaggggtagcattaggagaaatacctaatgtagatgacgggttgatgggtgcagcaaaccaccatggtacatgtatacctatgtaacaaacctgcacgttctgcacaggtaccccagaacttaaagtataataataaaaaaaaggaagttaaaaaaaattactaagagtttcaagacagtgacgacaaagcattaaatcaaacatagggcccttctgagtgcagggtcctttgtgactgcatgggtcgcaggcccatgaagcttcctttgtaataaaagaaaatttaaaacaaataatatgtacaatcacaaagagacaatacataaagaagaaaattgctgatcatgacttcattaaaatagcgaatggctagtcaactaagaaaattgtagataaaattaagatgaataatatttgaaagagcacaatacagtgatcactagaactaaggagcctcagtttgagtcctggtttcacaatatatcacaagaagaaaaatttacttaaatcctttgagcctcagttttcttgtgatataagataaatgactgtattacttacttcattgggtttttgtgagaattaagagagctaatagatgtaaagaacttagaacaataccttacacataataagcatgcaataaatagtattcatttgtattatattcacagtgtataaaataacaagaagttgagggctggccaagatggccaacgagaagcacctattgtgcaccgctgtcacagagcaaaatagaagaggcaagtaaatacagtatcttcaactgaactgggtacgtgcattgggattcatcaagaaaacaacccaacccacagagaacagagaaaagcaaggcaggagaaccacccacttgggaatgacatgtagccagggtagcctcccctgcccagagaagtggtgagtgagtgagcgaccttgggaacccatacttttcccacagaactttgcaaccctcaggtcaggagatccctcatgaactcactccaccagggccttcagtctgacatgcaaagctatgtggagtctcgtcagagcatccactcaggcacactggaagccacaggagctttagatacccaggcttcccagcaaaagtaactgcaactctggcaaactgggaggttagacacccccccccatatatacccctagaaaacggtctaaatccacggggctgagcaatgactatctgcaagccccatttccatggaacatcacaggataagacccaatagctttgaactctaggctgccatgggtagcaacattatacctccctgagatggagatctcagagggaggcttgggctgccttctttgctgtttcatagccttaaccattggtgccttcaggctctggggaatctgaggtgactagggactggagtggtaccccagcacaacatagcagctctacaaagagatggccagaccactttttcatgtgggtctcagatcccatttctgtttactgggaggaatcccctgaccgaggtctacaaccacttctgctggtgttttccggccagtagcaatcccaaacctccctagcagagctcccagaggaggggtaggcctccatctttactgttttgcaggcttagccattgtcacttttgggctttggagagctggaagcaactgggggctggagtagaccccaaagacagcatagctgctctatgaaaaagtggccagactgctttttaatgcacctcctgatcctgtttttcctcactgagtgggaacttctgggatccccagccaaccctgccagtgtgtttgggctggtaacaggtccattccttcctggagcagagctcccagagggaggcgcaggccgccatctttgctgtttgacaaacttcactgttgataccatcaggtactggaaaatctgaagtgactagggactggagcagatccccagaatatggtagcagctctatggaaaagtggtcagactgtatgttatgtgggtccccaatcctgtatcttctcctggggcagatcctcccagcctagtctccagtcacccttacactgggactattgagccagtagcagttctgcaatgccctgggacaaagctcccaatggaaggggtgggttgtcatctttgctttctcacagtcttcatccttgtgtccccaggccctggagagtctgtgggaccaagggctggttgggacccataacacagagcatccacatcatagaaaagtggctgaactgttctccatgcagatcctgatcctcacttctcctcactgggcaaggccacatgacctgggactccagcacaatcacccagctgccacctgaccacttcaatcagaggcagttctgcagttaaaggaacactcacacacagagatgagaaaaaaaaaaaaagaactctggcaactcaaatggtcagagtgtcttatgtcctccaaatgatcactctagttcttcaacaagaattcttaagcagactgagatggctgaaataacaaatagaattcagaatatggataggaatgaagataattgagattcaggagaatggcaaaacccaatcccaggaagctaagaatcacaataaaacgatacaagaggtgacagacaaaacagccagtataaaaacaacctaactgacctgatagagctgaaaaactcactaaaataatttttcaatgcaatcacaaatattaatagcagagtagacaaagctgaggaaagaatctgagaatttgaagacaggctctctgaaataagagagtcagacaaaaataaagaataaaaggaaaaggaatgaacaaaacctctgtgaaatatgagattatgtaaagaggccaaatctacaaatcactggtatccctgcaagagagggggagaaagcaaacaacttggaaaacatatttcaggatatcaaccatgaaaacttccccaatcttgctagagaggccaatagtcaaatgcaggaaatacagaaaacctctgcaagattctagacaagaagatcatccccaacacacaaaatcatcttattttccaaggacaaaatgaaagaaagaatgtaaaaggcagcttgagagaaagggcaggtcacctacaaagggaaccgtatgaggctaacagtggacctctcagcagaaatgttgaaagccagaagagattgcaggtctatattcgatattcttaaagaaaaatttctttaaccaagaattttatatccagccaaactaagctttctctgtgaaggagaaataagatcttttcagacaagtaaacattgagggattgtattactagacccaccttacaagagatcttgaaaggagtactaaatatgaaaagaaaacaccattaccagccaatacaaaaacacatttaagtacacagacccgtgacactataaagcaaccagacaaacaagcaggcataataaccagctaacaacaaaaagacaggattaaatctacatatatcaatacaaacattgaaagtaaacaggctaaatgtcccaattagaaggcacagagtggcaagctgggtaaagaagcaaaatccaattgtatgctgtcttcaggaaacccatctcacatgcaatgacacccataggctcaaaataaagggatggaaaaaatctgccaagtaaatgaaaatcagaaataagaagaggttgcaattctaatttcagagaaaaacagactttaaactaacaaaaacgaaaaaagacaaggaagggcattatctaatgataaaggattcaattcaacaggaagatctagatatcctaaatatatatgcacccacagcaggagaatccagattcataaagcaagttcttagagacctacaaagagacttagatgcccacacaatgggagtctccagtagggtatttcaacactcccctgacagtactagacagatcatcaaggcagaaaattaacaaagatttaaacaaagattgaactcaacattggatcaaatagatctgatagacctcagaactctccaccccaaaacaacagaatgtgcattcttctcatcaacacaggcacgtactctaaaaatagaccccacaattggacataaaacaatcctcagcaaatgcaaaagaactgaaatcataccaaacacattggtggacaacagctcaataaaaatagaaatcaagactaaaaaaatcactcaatccatgcaattacatggaaattaaacaacttactctttaatgaatttgaggtaagtactgaaattagtgcagaaatcaaaatgttctttgaaactattgagaatgaagatacaacataccagaatctctggggcacagctaaggcagcattaagggggaaatttgtagcactaaatgcccacatcaaaaagatacgaagatctcaaattaacaacctaacatcataagtaaaagaactagagacagaagacaaaaccaacccaaaagctagcagaagacaagaaataaccaaaattagagctgatctgaaagaaattgagatgagaaaaaccatacaaaagataaacgaatccaggagtttgttttttgggagaattaataagatgaatagactcctagctagatcaataaagaaggaaagagagatgatccaaataaacacaatcagaaatgacaaatgggatgctaccattgaccccacaacaatacaaataatcatcagagacatgatgaatcatgaacacatatgcacatgaactagaaaacctcgatgagatggataaatttctatacacatacatcctcccacgtctgaaccaagaagaaactgattctgtgaagaaaccaataacgagctctgaaattgaatcagtaataaatagcctaccaaacaaagggggagtgactcctccccaactcattctatgaggccagcatcatcctgatacaaaaacctgaaagaaacacatacatgaaaggaaaacttcaggccaatattcttaatgaacatagatgcaaaaattctcaacaaaatgctagcaaactgaattcagcagcacatcaaaaagctaatacaaaatgattaagtaggctttatccctgggatacaaggttggttcaacatttgcaaattaataaatgtgattcatcacataaacagaactaaaaacaaaactcacatgattatctcaatagataacagaagaggcttccaattaagttcaacattgcttcatattaaaaattctcaataaactaggtattaaggaaaatacctcaaaatagtaggagccatttatgacaaatccaaagccaacatcatactgaatagacaaaagctggaagcattcctctggaaaaccagcacaagacaaggatgtcctctctcagcactcctattcaacatagcattggaagtcctggctagagcaattaggcaagagaaagaaataatgggcattataggaagagagtaagtaaaactattcctgtttgcagatgacatgattctatatctagaaaaccccatagtcttggtcaaaaagctccttcagctgatacactatttcagcaaagtttctggatacaaaatcaatgtacaaaagtcactagcattcctatacagcaacaacagtcaagctgagagacaaatcaggaacacaatcccattcacaattgccaaagaaagaatataataccaagaaatgcagctaacaaggcaggtgaaaggtctctacaataagaactacaaaacactactcagagaaatcagagataatacaaacaaatggaaacagatttcttgttcatgggtagtaagaatcatattgtttaaatggccatactgcccaaagcaatttacagattcaatgctatttctatcaaactaccaaagacattcttggtagtttctaaactaaagtttagaatactagaataaactagtttattctagaaaaacactttaaaattcatgtgaaaccaaaaaagaacctgaatagccaagcaattctaagcaaaaagaacaaatttggaggcatcatgttaccctacttcaagctatactacagagcaacagtagccaaaacaggtttcctgaaaaataccagggtattctttcaggaaagtcccaaaaatgggaaagtaaatccatatctctgtcctaggaaataaaaagaaatttgactaagaaaacatattaagccattgagacctgtgttggccatagttctaaaactaacgaacaaacttagtaaggaaaaaaaaaaaacaagaatgaaaaaaacaaatgaaacttcacacaggaattccccaaggccactgattcatattacaggtgtggaaaggcatcctgctaattcctaaaatctttctcaacaccaggggacactctccctttggatttctatgtctagagacctgtggctcattaaaaggcagactgatttttcagaaagagagaaagaggtttttaaagatgagtttatgctgcaatcccaacatgaactattacttcaaatatgttttaacttttataatcactgggaatataaacatgaatagcttccttaactgtgaatcagaacactcaatcaggtaagagaatgaactaggagacaggctgtgaagttacacataatctcaatatgttaatgaatgatctatctacttgctagtattaaacacccagtatctagatctcattttctatctaatggtggactcctcattgtgtttgtgagatatgaaggcccttgacttaccatgtttttattgccataccttgttctcaattcaacatatctagttctctagacattatccaaagcaaacatgtgatttctaaatggtgaaatttcagtgaaggaaacgatttactacagaccactctgactgctaattttctcagaagctaggaatatatgttttaccatatggatttttgggacaattttgttttctgggtccaagaaccaaaaattatatttgaaatataatttgtattttaaacaggagtggtaatttttaaatatacaaaatatacatggtcattcaagaaagttattgtgaattatttgaaggcagtccttcatggaggtatagtaaaagttagattgtttttcaaaacttcttcccagctatgaagccaaaaaacccatgggctctctagaagtgttcccttgttcattatttttttttaccctagtcacatcaaattatattcttttctcctcagtggtttctaaaaccttgaatgatactccttttataggaagcactccaatgtcagcatctcttttcaatttctttacagttctactagctctctcagtgcctctcacttctgtaagttccccacacatcctgacttcttccctcccaatatacaagagctaatccattacagcctaatgaaaagaacaaagaagaagctacttcacaatattatgtctgcttttattagtaaacctaatgaagataataccagtactttgcaaattatggagaaaaaatttttctagaaaatgtaatggatctagaagagaagaaggtgaatttcacttgaggtagaatattccttaatatctgatgagtgagtttatttcaggcaaaataaaaacagaacttaagaaaatagatcacaagagaagacaatttcaagaaggctgaatatatattttgaggagaggttagtattggtgaaaaaagaagagaaactactgaatctatcagaggaaatactattcttatccagggattcacagatttcctaggaaagaaagagtctaagatcaactggtgaataaaagcacaataacatttgcaatgaaaaaaataatttgggattctatttcaaaaaatgtataaagggtcagattataggaagaaactgagctcatcatcagatataatagtgatgaaattttaaatattcaggttaatatgtgattaatgtggtcatgtttcttaccccagtaggtcactgcgacatttcagggatgtgggtcaggaagagatcagtaagagaatatctctaattcatttacattctaaaatgaggaaatgcaattactactactctttcaagatttaaaaaaaaaatcgtggttttgatgcattgaaacctgtctttttatttaagttaacatcctactggtggtttcttactaggccaagagatagctatgtggtatgcttaaaaattgccccctgtgagagctgcttgggaagatgaaaggaaagctgtgaccgaatgaagatattcacaggcccagagatgtggctaatgcctgtaatcgcagcactttgggaggccgaggcaggcagataacttgaggtcaggaattcaagaccagcctggcatacacggtgaaaccccatctctattaaaaatacaaaaattagccaggtgtggtggtggactcctgtaatcccagttacttgggaagctgaggcgagagactctcttgaacccaggaggcggaggttgcagtgagccaagatcacaccactgcacttcagcctgggagaaagagtgagaatctcaaaaaaaaagaatgaaaatattcacagccagagaagactgtaggctagcaacgttttctgattcctgggagaaagaaatatattaatgaaaaacataataaaaaaatagttgtgtcagagatcataacagatatatatatatatatctttaatatttagccatctaaaagccaaaaatgtaaaacttgtgaggttgaatcatgcaaaacaacaatactctccctccagatattcttggcttggtaagaaaattctgagctggaaggattctgattgtgattagtgttccatacattattttgtcttttgtctgaagcaatgctgaatacaacctcagtcactgaatttctccttttgggagtgacagacattcaagaactgcagccttttctcttcgttgttttccttaccatctacttcatcagtgtggctgggaatggagccattctgatgattgtcatctctgatcctagactccattcccctatgtatttcttcctgggaaacctgtcctgcctggacatctgctactccagcgtaacactgccaaaaatgctgcagaacttcctctctgcacacaaagcaatttctttcttgggatgcataagccaactccatttcttccacttcctgggcagcacagaggccatgttgttggccgtgatggcatttgaccgctttgtggctatttgcaagccacttcgctacactgtcattatgaaccctcagctctgtacccagatggccatcacaatctggatgattggttttttccatgccctgctgcactccctaatgacctctcgcttgaacttctgtggttctaaccgtatctatcacttcttctgtgatgtgaagccattgctaaagctgagcttaatcagtggctgctcagtactgtcacagggacaatcgccatgggccccttctttctcacattactctcctatttctacattatcacccatctcttcttcaagactcattcttttagcatgctccgcaaagcactgtccacttgtgcctcccacttcatggtagttattcttttgtatgcacctgttctcttcacctatattcatcatgcctcagggacctccatggaccaggaccggatcactgccatcatgtatactgtggtcactccagtactaaacccactgatctacactttgaggaacaaggaagtgaaaggggcctttaatagagcaatgaaaaggtggctttggcctaaagaaatcttgaagaactcttctgaagcataaataaacaattaaaaagatgagtttgtaattacattgtttcttaaattatttagaaatgtacaacagagggaactggataaaacaaaaatatatggaaaaatatgctgtagttgtatttaacaatgctttcctggattatataagggacatttgaatgaatgggatactagccatggaactctactgctgactatgttttgaagatatcagttgataaaattgatgttaggttttttatatgttcttatgatgaaattgggtatagaaatatgcctgtttttcccatatatcaaatatatggataatacttgggtctatttatctatctggtccctctaggttaatgcattataatattataaataaaattattatgctttgatattttgaggattttactttagggccatagttactcaactggaaaagaatatgctaactgacgtatgagttaaggagaatttttaaggggtgggtcttgatttcttattcttcaaacaaggagacaagtaattaaagcaaatgacattgtaatcactaaataacaacaacaacaaaaaccctgacagttcatctaaatagttttggcacctctgtctccagatatctcttattagtcaactgtccacaccctcaatgattacttaaaatattaaaaatcggagataatttaacaaagctcttaagactctttcaatctcgttaggatgttattgttccctcagcctttaattgcggaagatgacgactttatcaaaattttattttctttttcttacttggcaccaaactcatactaagcaaaggcatagaagtcataattattgaagtatttctagacatgaactgctatgttcctcactttttaagttcctataaatggcttctgtccctgaaaaaatggtggattctataatttataaatatttaaagaatagacagaaaatactatgaaaaggcattttaagctggtggactgacccttcaaggtccctgcatgcacttttgtaaatctaaacaattttattctgacttctctccatgcttcttttgtcttctaacttcaccttctttggtccctcaattccagtttagtttataataaaacaaaacaacaatgtgtgtgtggagatggcaactcctaatctcaactgtcccacactatcagtaatatatttgatgcatatttttatacaatatgttttttctgtcatttctggtggtgagaatctgccacataattcaaacttcagagagtttgtgaactgtagaagagcacatggggttctggttaactattagtgcataacacattaggaccccaaaattcaatcgcttaaaacacttaagttacatgctttgttgggtaagaaatttggaaaaacacagcagagaatggttgactctgatccataatgtctctgacctttgctggaatgacttcagtctggtcacggaatagctgagagctgagtaagtctctctctctatttctttttctcctcccttaattgctccttgtgactatcatatgcttcttcaacagggaagcctcagacagactttttcatgttccagtagaccacggcaaaagctgccagcctggggctgagattgaccagtaataaaatgtctcctattcaaaaaagcccaggatctgatggctttattgatgtatactaccaaacatttataggataattaatgccaatcttcttaaactcactcaaaaatatgaaaaggaagaaatactttcaaactcactttatgaggtcagcattaccctaataccaaagccagacaacgcaactataaggaaatgcagttacaggccaatatccctgatgaacatagatgcaaaaatcctcaatgaaaactagcaaaatgaattcaacagcacattaaaatgatcatacaccatgactaagtgggattcatccttaggatgcaagaatgggttaacatacacaaattaataaatatgatatgccacattaacatactgagggataaaaaccatatgataataggtgcagaagaagcatttgataaaattcaatattctttcataactaaaagaaactttcaacaaattaggtatagaagaaacatagcttaatgtaataaagataatgtatatcaagtccactgctattctcattatcagtgttggaaagctaaaagcttttcttccgatatcaggagcaagtcaaggaggcccactttcacaatttctcttcaatataattctgacattcctagctatagcaattacacaaaagaaataaataaaaggcatccaaactaaaaaggaagaagtaaaattttctgtttgcagatgactggatcttacatctagaaaaccctaatgactacaccaaaaactgtgagaactaataaatttagttaagttcacaggatacaaaattaacttacaaaagccagttgcatttttacaacaatgatctatttgaataggaaatcaagaaaacaattctatttacaataatatcaaaggtaaataaaatacttagggataaatctaaccaagaaggtgaaagatctgtaccttgaaaactataaggcatggatgacagaaattgaaaaagatacaaataaatggaaagatattctttattcatggattggaagaattcatattgtcaaaatgctcatactttcctaagcaaactgtagattctttacaatccctatcaatattctaatggaattttttacagaaatagcaaaagtactaaaattcttatggaaccacaaaagactccaaatagccaaggctatcttgagcaaaaagaacaaagctggaggcacaactacctgaactcaaaatataccacaaagctatagtaatcaaaacagtatgatactggcataaaaacagatacatagaacaatggaacagaatagagagcccagaaataaatctatgtacttatggtcagttggtctttggcaaaggtgccaagaacatacaatgggaaaagaatagtttctccaataaattgtgttggaaaaacttaatattccacctaaagaagaatgaaattaaaccattgtctcaaacaatacgcaaaaatcaatttaattggattaaaaactgaaaggcaagacctgaaactaaaactactggaagaaaacagggaaaaacttctcaatggtggtctgggaaatgatatttttaaaatatcatacgtaaagcacaggaaacaaaatcaaaaataaatacgattctaccaaactaaatagttcctatttaacaaaagaaaacatcaacagaatgaagagataacctatgaaatgggaaaacaatatttcataaagagttaatatccaaaatatacattttttaaaaactcaatagcaagaaaacaaatagcctagtttaaaaatgaggaaagaatctaaatagacattttttcaatgaaatagatatttccacacaaatggccaagtgtattttttaatgttcaacatcattaaatcaaaggaaatacaaactacaaccacgagatatcacttcacatctgttagaatggcttttatcaaaaagacaaaaaataacaagtattaatgaggatataaaaagagaacctttgtacattgtttttgggaatttacatttgtacagccattatggggaacatatagagattcctcaaaaaacataaaggtagaaataccatatgattcagtaatcccacttctgggtatatgtctaaaggaaataaaatcagtatttcaaaaccaaacattgtatgttctcactgatatgtgggagctaagctataaggatgcaaatacataagaatgatacagtggacttaggggacttggggtgtagagtgggagggggggtgaaggataaaagactacaaatacggtgcagtgtatactgcttgggtgatgagtgcaccaaaatctcacaaatcaccactaaagaacttactcatgtaaccaaatactacttgtaccccaataacctatggaaaaataaaaaaaaaattagtatttcaaagacatatctgcactcttgtgttcattgcagcatgattctcaatagccaagatacagaattagcccaaaggtccatcaaaacagagaagtggatttaaaaatgtgacctatataatgtgcatatagcgtggtgattatagttaacaatactgtattatatacttgaaattttctaaactagaagatcataaatgttctcaccacacacatacaaaaggttgtaactatgtgaggtgatggatgtgttaattggcttaattgtggtaatcgtttcacaatgtatacatatctcaaaacatcacagtaaacatcataaatatatacaacttcatgtgtcagtcataccttaataaagttaagaggaagaaaacgaccaccaaaccctctaggcaggggaatatatcaataggaactttaaaaactgaaaagcgaagaaaacaaagacttattaaagcagagaagaatattcaaggattctggaaaaactccaaaatatgtaatacatacaatgggaatatcagaaggagtagaaaagtagataggaacagaagaaatatttgaagcaataactgaaaatttccccaaattaatatgagacatcaaacttcaaatctaggaggctcaaggaataccaagaagcataaatgccagaaaaactatggctaggaatatcatttttaaactatggaaaattaaacaaaaatcagaaagtcaaagattttttttaaatcatgaagaagccagaggataaaaaataccatacctttagggaagaaaagatgacatctgagttcgcagaagctacaaaagttagaagaaaatagagtgaaatatttaaaatttttgatagaagaaaaaccaatctagaattctgcactacatgaaattatccttcaaaagtgaatgagaaataaaccttctcagaggaacaaaaattgagggaatttattgccaatagacttgcctggtaaaaagtgataaaataaattttttagagagtaataaaattatacaagtgagacatttcaatccacctttaagaacagaagagcattgaagaagaaataagtgaaagtaaaataaaagaaaaaatatctaattacgtatgcttatgtaagtgtgtgtgtgtgtgtatgctttcatatgcttaggatggtttcataactttgctcttgtgaaaagtgctgcaattaacatacacatgcaggtgtcttgtttgtaccatgatttattttcctttgggtagatatctagtattgggattgctgaatcaaagggtagttctaattttagccctttaagaaatcttcatactgttttccatagaggttgtactaatttatattctcatcaacagtatataagcattcccttttctctgcattctcaccaacatctcttgtttttgactttttaataatagttactattactggtatgagatgatatctcagtgtggttttaatttgcacttctctgatgactagcaatgttgagctttttttatatgtttgtaggttttgtaggctgattgtatgtcttcttttaaatgtaagacctgaaactataaaaattttagaagaaaacctaggaaaaactcttctgaacattggcctaggcaaagaatttgtgactaagacctcaaaagcaaatgcaacaaaaataaaaatagacaaacagaacttaattaaactaaaaggcttctgcacagtgaagggaataatcaacagagtaaacaaacaacctacagaatgggaaaacatatttgcaaattatgcacctaatacgggactggtatccagaacttacaaggaacttaaacaactcaacaagaaaaacaaataaataaccccattaaaaagtggacaaaggaaatttttgtatttagtatatgcgtgaaatgtttgtattttaaaatgtcaaaagaaaaaaaaattagtacctaacattatcctttcgcactgtgccaagagtagacattcattatagtgcttttacatctgtgaacacccccactacattgtgatcatttcctagattccttaacagctggtaacaaccatggaaattaggtcctaccaatcagcaagactatgcatgtggaattcagtcttctctgcatgaaacagaggaatctggtccttctggagcatcagtgatggatctagaagtactctagggttgagtaatgatgacagtgatatttacgccaacaagagaccctctgtgtttctgcatctcattcctggcagaataattcagagtctgactctctttacctacaggatagtgtgtgagctatcaaatattatataagaaaaaacagcagcttaaattagccagggtagcttatgttgtttgcaactgaaaccacaccaagaaaattcacttctctcaattactcactcctgattttagttacatatgcacacagacacacagaatagagcctgatatggtttcgttttatgtccccacacaaatctcatctcaattgtaatctcccatgtcaagggagggacctggagggaagtgatttcatcatgggggaactttcccccacgctgttctcctgacatatacactaagtaaacagagctctggtctatataaccctgggaaccaaccacatcctctctgtactacttacctccagacttcttttacttgagagaaaaattaacttttacttacatgacaatttttacttttaaaactttgtattgacagtttctaatagctaagtgtgattcctggctgactgatatataatgtactagagagccatttattaaaatggtgaattttggaattgaaaaaggaacataaaaacatttggaataaaagttaatcatcacctttccacaatggatgattaaagtattagggaaaacgttaattagaaactgagtaattgatagatctgactgataccacctcaactcactggacaataatataaatagcatctctaagagtgggacaactaaatatcatgtgtctcaggatatgatgcaataaaaataacatagcaacttaagtcaatggcatgacaaaaaagtggggtctgctatgttataaagggactggaaagacaataacaaaatacattgtgtgaaccttgtttagatcctaattttaagaaattacttaaagatcaatggagaaatttgaacatggcttgtgtattagatgatataaaggaaatactgataattgtgctaagtatcataatggtattgtgggcatggttttttaaaatgtctttattagtcacagattatactaaatacatatgtggaatatgtacatacataacttacacaacataatagttatacaacatctggaatttgccctaaaattttccatgaaaactaacaaacaaggagctgtagctaattaaaataagattagcaaaatgttgatgttgaagctggatggtggctacatggagtacatgggggttcactgtgctcttctcttttatgtatgtttgaaatgttctacaagaaaagaagtttaaaagaaaaggaattcagctttagatttttaaaaacacatatccttagatcttgcaatttaggtgctaaaagtttattacaggaaaatccagatgtaaacaatgtacagtaaaagaatagaatacaactaaaaattcccaaaatagaataacaaatcatgtttagccatacgatgaagcccagaagaataaagaaatagatgcttgttaatagaaaaagttgttcgtgacacagtgttcagtggaaaaccagattacaaactccatgatccaacttgtatgtataaatataaatacacatagaaagaaatttttaaatgtcatacaacaataatataaaaaacaatatttctaggtttattttggtattgctgtattatttttaaatatttatgacatatttaataaagaactaatcaaagtttaaataattttgattatttgacatggatggaattggaggctactatccttcgcaaactaacacaggaacagaaaatcaaataccgtatgtcttcactcataagtgggagctaaattatgaaaacatatggatacatagaggggaacaacacactgaatcctacttgagggtggaggttgggaggagggagaagatcaggaaaaatgattaatgagtactaggcttaatacctgggtgatgaaataatctgtacagtaaacccccatgacacaagtttacctatgtaacaaacctgcacatgtacccttgaacttaaaataaaagttaaaaaattgttgccctatcattttcatttttagtataactgcagaagagttcaaagagaatggtcgaataagacaaagttactcctctccaacccatcctggaagagtccccaatggaggtgtccgaagtccaaaataacatcttcattactctccttcaatcaagtgtttcagtttgtttgatacagagaatcttccgaagtgcctgatgcacctccttgttcctcatggtatagatcacaggattgaagagaggggtgaccacagtgtagagcagggagaagaccttggagaggagctgggaatggacagcagagggtgcaacataaaagatcatgagcgttccatagaatgtggtcactacagctaggtgggaggagcatgtggagaaagcccttctcctgcttgccccagcaggaactctcagcactgccaccacaattctggcataagatgtcagaatcagtccaaaaggaatagtgaggcagaacacagacagaatgagagttgtcacctgagccactctgggatccgagcaagccaggcccacgaaaagcataaagtcacagtaaaactggtcaatgtggttggggccacagaacctcagctgggccaccagggccacaaccagtccatctaccacaaatccagagagccaggttgtgaccaccagccccatgtaccgtctgggccccatcaggagtgggtagtggagtgggtagcaaattgccaggtagcggtcatatgccatgacagccagcagtaagcattcagctgtggctagagagccgaagataaagaactggagcaagcaaccagccacagagatagttgcttcttgcaggaagccctccagcatttttggcatcactgcggaggtgtagagaatatccaggaaggacagattcgccaagaaaatatacatgggtttgtggagcctctgggagctaaccactgctacaataatcagcatattccctatgatgatgaagacatagacagcagtgaatacaataaaaaacaagaaatgcagttcagggatgtcatagaagccaaggaggacaaattcagtaatagtttcgtttcctgtggagacaatttccatgtcgatcgtccaagtttctgcttggcaataattgggggagaaattttagcatgtctctgcatcttctataccaagcctaacgttattagagctaaaacaaaacaaaacaaaaaagacaaaaatgagtctctaaaacaagactcgctcacgcaagtcttcaactatcccccttcttagttgtcattccttcctcaactctcatccttccctgccttccttaattgtgcatattctttaacgctcagaagagtttatccaaactcataattttagtctttcaaagacctttaccccattaattcaatctactacctctttcgcataatcacctctatcattcttatctgtatagtcagccatagcctccttcttgtgcaccagtataatattctccaaatgtgtgctatatagacatggcccacaactgcaaactcttctatctttctcaatcacaaccaattcctctatgagtggtttgagaattctgtctaatccccatggtcactatctcattcttctcattatctcaaccgcccctttcattccccatctcctaatcagtgataccttaccaactgttcctcggataattcttatatattcttcacttattgccttccttaaatagtagtttcatcaagtcattcaggagttggtagtgaaaatgtggtaaatggtaatagggaaggaagtaggtgccatgggagcagagaaggaccaaacccagcctggggttgtggggcagaaggtgtgggatcaaggtcggggaaggctttctgaagatagaagcaagtaggctaagttttgagggccaattaagagttggccaggaggccgggcttggtggctcacgcctgtaatcccagcactttgggaggctgaggcgggtggatcacgaggtcaggagatcgagaccatcctgactaacacagtgaaactccgtctctactaaaaatacaaaaaaaattagccgggcgtggtggcgggcgcctgtagtcccagctactcgggatgccgaggcagaagaatggcgtgaactcaggaggcggagcttgcagtaagccgatatcgcgccactgcaccccagcctgggcaatagaacgaaactccatctcaaaaaaaaaaaaaaaaaaaaaaaaaaaaagagttggccaggcaaaagacaggaaaccagaccaggcagggcatccctggcaggaaagcatatgcaaaagcaaagagttgtaattgagcatgacacttctaaatatctgaaaatggctctgtcatacctgctggaaggttttcatatgctattcaaagcaatatgtgtttattaactgaagacaatgagagagaatacagggaatgattagaaacagttgagaaaggtagagaaaaaaagcagatatcatataaataaatataaatacataatactaacagtgttactttctagaatatgggattaataaacatacattatatttattatcacaaaaaatgtaagttatctttaatacaaatagtctagaacatcagtttcctaagaggtgaaaaactggatgcctcagggaccacagtgctgggagccttcacggcacactgttttgtagttttgcctaagaccaaatctgccttttgaatggaatcccattttccatacctctgctcattgctaacgttaaatcctcgaagacccagcttaagaacttatctctaccaagaatcccccttgactaatagagccctttatttctctcccaatcatgtactaaggatctagtgtatagaagatattacatctgtttctgaggatagtgggccaaacaaaactggtccatactcttaaggagtttacactcttgtgtgacagatggacatatcaacagaaaattgcaatacgccaaaagacagttaatgaattcaacctgaaagaaatagtactaggaggaagtgatgctgaactgatgagtgattgcagtggaaaatggaaagaatggaggtgagggcattttaggtaaaaggaaaaccatgagtacacactgaggcaagaaacaacattggatgtgaggaggagaaagaggtagcagggggtaagtagccaagggtagctcaaacaatcccctcgattctgaaggagaattaggattgaggtgaagaatgggggaagacagggagagaaaggggccaggatcagagtctggggacccttgcttgtcacaagaaggaactagagcttcattctataggcagcaaggcacagctgaaggcttttaaacagtacagtggcatgtttcaacctaaatttaaatagtattatggaagctacatccaaggtaacaagagtgaaagaagggatggccccactcatctgatacctgatgtgcaaatacatgctgccttgagttcatcattaattatcttatggtatgcactttctcttttccaaaagactaaaagttcatttagcacaggatttaaatttttataagtgctactgtaccgaagtcttacaaaaagatatattctcaatgaatacttaatgtttaacaccatgtcttccttaacctaaacccatatgaattgatcagagaagaatgctgttcttcatagactacaaaattccacaggttctgttattgccctccaactcccgtctctaaagctattctcttaccctttgatcccatctgcatttccttgtgagtgaatctggcactccctatgtgggccatctttaactctagattattttatctggtccaaactcattctgaggcttggagtctttctataggattcctgccaggagagaggtgagcatgtaaatcaggcaagaatacctctaataataaatagctcatgaccactacctcccctggaaatcaagagtatcattggagctggaggctattattttaagtgaaatatctcagaaacagaaagtcaaatattgcatattctcatttataagtgggagctaaataatgtgtgcacatgaacacagaattcagaataatagacattggagacttggaaaggtgaggtgggaaggggtgagggatgagaaattacctaatgggtataatgcacactatctgtgtgatggttacactaaaagcccagactcaatcgctacacaatatattcatgtaacaaaactgcacttgtacccctaaatctgtaaaagtagatatgaaaagaaaagaaatgggaaaaacacagaaacagtaggatatatgagaggctgttattcccttaaagacagaggggaatcagggaatagaggaagttgatgaatttagagttgaaaactccaaggaatagagctgaatttggaattggaaaactcaaaaaactgcaggaagagtttgaaatcaacaggaatttcaccatactgactggtagagaagtgagaatagtgcaaaatgcctgtttgttgtctaacgaacaatcagccacacactcaattctaagtaaaaaccataaccctcattcaacccagactctgagatagcatagagtccttaattaaaacgagcaattcaaagaatattccaggaaaaaatattttaaaaaatatatacaaaactgtacattttaattcatctttaggtattagaaaaaaatttattctcatattttgaaatgtctgctaaacaaacatgttatgtttgtaagcagaaaaccaaaaagttaattcagtttgatttttttaatctgttaattctcctcaagtctcttcagtaattactccataataaaacattaaaatatacttaaaaggttttaaaagaaaacagtataattttaagtatatcccagttttgtcaagccatgggatagcaggaggaaaactttccaccatgaaaacattagtatgagggtgtctcgcttcttcctactctgtaacatatcaactgaagcttggggagcatgaatatctactgttccccatctccaaaagagaagagagaattaaaaaaataagtcagtatgcacccagaaggattagaaatcaacttttaaaaacatccaatggagaaaagagcagcactggtattctagagaaatactgcgggacttcttgaaatgatttttaataaaagactttttgactctctgggttaattgaaagttgctagtgattacaggataaacagctataaaaaccagccatttaacttttttaaagaatctgtgaactaagctgtaaagaattttacaaaaataaacgtacccgaaatatcgaccctgttctctaaagacaggactgtgaggaggagatgatctgctaagatttgctgaagacttcagaatgttggaatttcctaccttcagctccctccctgcttgagctcaacctgaagtaacgtagaacattgattacaaatgtcacccttgttaccctccactcctgagccattttctcttccaccctccatccccttttctagctctcaggctattctgtcctttcatcgcagtcctttccctctatcacatgggagggcaggaaattgccacaaagggagaggcccctgagaaccaattacagatttactggagagcagcctgaaatgagcaagacatagcaggcccctaaggaaattgtattttttcaaaggcggtttcctgaactgttggcttgaccataaacggagcagaaaccaaaagagccaaatggagcccacctttccatccccttggggacaaatgctctccatttcaccaaacatctaaagccccaattcctagtctccataactcaccagaaaattctgatttctctgcaacatccctaaattccccattaccaacagtggtcctcccaggagcctgccctcaactttcattctccaatctacagcctccaaatcgccctcttaccatcccaggcaattgtttcaataggtaccacccttagtaggggtgttttatatagatcatcaaaatcttgccaatgctgagcctgatttaaggagaaggaaggtggcgtgatgttacaaaatgacgttgaaatggttatgtagcgtttcaatatccttcctgaccaaattactgcccaacaactttgtctgccactactcccttttttgaagcttccacagaaatcaggctgatatatttatttctcatccctaggagtgtgttgaaggcacttctgtgtcatttatcaaactcagaccctaacttcagctccactttctccctgaccaaccgagaacactttttctctgaactacgttgtctactatctgtagttcacagtaaatgccaccctattttttcttggcagcaggaggggttctcttaatcgtttatttttttcatcaaacagcagcatatgctaaaaggtaagtatatgtgtcttgaaaagaaaacttttggaaaaatgtagcattttttagttagcctacattattatgatttttaattgacaaattaaaattgtatatatttatgatgtataacatgatgttttgacatatgtatacatcatggaatgacaaaatcaagctaatttacatgaaccattacctcacatacttatcatgtttttgtgatgagaacactcagatctactcttttagcaattttcacatatacaattcattaattatagtcaccctttcatataatagatctcttgaattatctctcttgtctaactgtaatttttgtaacctttgaccaatatcttctcaattttctccctttcttccagcccctggtaaccaccattctattctctgtttctgtgagtttgactttgtagatttcatgtagaagggagaccatgaggtatttgtccttctgtgcctgacttatttcagttaatataaggtcctccagattcatccatgttgttgcaaacaacagaatttccttcttctttaaggctgaatagtattccactatgcatatataccacattttctctatccattcatctgctgagggatgcttaggtttattccacatcttggctattgtgaataatactacaatgaacatgaaagtgtagatctctcttcttatttcctttgaatatatacacagacaagggattgctgggtcatacaacggttctatttttaattttttcagaatttttcagaaacctccacagtgtatttaatgactgtactaatttacgcttccaccaaaagtgtatgagttctccttttccacattttcatcaacatttatctcttatcttttctgtagtaggcattctaacaagtgtgaggtgatatcttattgtgaatttaatttgtatttccctgatgactagtgatgttgagcattttttcttgtacctgtttgtcatttgtacgtcttcttttgagaaatgtctattcaggtgcttagctcattttaaaattgagttatttgtttccttgttattgatttgtttaagttccttatatagcttgaattttagccacttacatgtatcatttacaaatattttctctcaacctgtgggttgtcttttcactctattgtttcctttgctgcggagaaatgttttaatttgatgcaatcccatttgtttacttttggttttgctgtctgtgatttgaggatcatatacaagaaatcttgcccataccaacgtcatggaacttttctcctatattttcttctaatagttttacagtttgcagtcatatgtttaagtcattaatccattttgagttaattctcatatattgagtgtcataaggatccaatttcattcttctgcatgtggatattcagttttccaacatcatttattaaaaagacttttctttcaccgtttcatgttctgtttatatgatcatatggttttatctttaattctgttaatgttatgtatcacatttattgatttgtgtgttgaaccatccttgcatctcagagctaaatctcacttgatcatggtgaaagatccttttagtatactgttaaatttggtttgatagagaaacacaacttcagagataattcaagtttaagatgggaaagtctgactaatcttaattcttacagatattttagcaaactttttgtcaaaatacattttatggactttttaaggtcatcagttcagaccacagtcccatggataaagacaaggatctgtggggagtagatgtttgtattgttaatcaccctggtgagaggttaatcctggggtataaatgaagtctccaaaagtaggtgatatattagcatgaaaaatacatttctaccttcccttgtgtcctggggtcaatttggcctaaactgcaagacgtgaaaagattataagtagttccaaatgaaatgaaatatacccttggccacataaattacctagtggaattcaagtgtgtgtggatcagtataacagcatataattctctgcactacatttactttccactaagttagaactacagtaaattattctataagctacaacttgatatatgttgtactaggagaattctaagagggcctgtggccttgcttagaaaaagcaggtacaggggacagtggttgctgttcccacagccagggtggagaaagcaatgtcaaccactgcaaaggatgacaaaataaaaagagtcagtcagctctcacagagcagcagcttgaaggcacagaaaagacacaagagaggaaggaccagaggagacattcctgaacacatcttgcaaactctcagaagtgactatgggatgcttcacgggggctaacttcaagctcaagtttgacaaccatttatgttgtttggctttggtcacatatatatcctattttgtatcagtaattccagttggaaaagaaaccacacatttccatgagtctcccatgttactaaaatatttcataagctcgagctcagtgatgttttctgattatttgttccttagactccagcctaggcatccaaggcaatctgaatccatagaaactttaataacagtacatcatggacctaacccaaaatattgttcaatctcttatctttgaaaacttcttgaggattaacaatatattttaatacaaaagagatagtattcaacccagcaggattttacaaaaacaaattatagctctttgtggtttctgttagagatttacatagtcttaccatttagatttcttcttcactagactacgaattagaagtaaatattatccagggcagatggtgtatcctattcatctttgtatcccaagaatattttagctgtgtcataaatgattagtgaataagtagcaatgcatgaatgcatgaatgaaaaaataaaaatggtcacttgattcataatccctggccttctaaaaatatattaacacaatgtccggttgaaaagaaagttccaaacattccaccagtagacatgactagcaatagagttgaccttcattatttgtggattcagtatttgcaaagtcacctgctccctaacatctatttttaacccctagctcaatactcacagcaccttcgcagtcgttcatggacaagtgcatgaacacagtgacaaaaagtttgagacacactgtatgcatccccacctgatgctgagcaaggaaacgctctgtcctcttgtttcagctattatactgtaaacaagtgtccttttcatgatttcctgatttgctgaatgccatatttttcacattttttgtttgttttttggtgatttcataattcaaaatagccccaaatgtagcgctgaagtgctgtcccatgctcctgagcacaaaaaggttgcaatggatcttacggagaaaatgcatttgctagataagctctgttcaggcatgtgttatagggctgttggctgtgggttcaacgttaatgatcaacgatatatattatataagatgtgtttaaacagaaacacacttacaataaggttatttattgatcaggtgacaaaaatgtgaccaaaaactcataggaatctaaccctgcatctcccctaaagcaaggaattatttaatatttgctcctacagggttcaaggcaactttatagaatgcaactgcagtgaataataagaatcagctgtgtctgcattttaaagatgagaaatatgagtctcattaaaatgaagtgaattgtacaaagttatagaataggttagtcatagagccagcattaaaaccctggcctagttcagtgctctgtcagctgtatcttcagttctgaaaatgcaataagaaaagataaaatacggaattcagtcggccagtggcccgcaatcctcttctctcggttcctctttcctcgctcaagatggcgctgctcgcgaagcgttcttggcgttgggcggccgcagcggctgctttcgaaaagcgccagcacaatgagataccatctcacaccagctagaatgccgatcattaaaaagtcaggaaacgacaggtgctggagaggatgtggagaaataggaacacttttacgctgttggtgggactgtaaactagttcaaccattgtggaagtcagtgtggcgattcctcagggatctagaactagaaataccatttgacccagcaatcccattactgggtatatacccaaaggattataaatcatgctgctataaagacacatgcacatgtatgtttattgtggcactattcacaatagcaaagacttggaaccaacacaaatgtccaacaatgatagactggattaagaaaatgtggcacatacacaccatggaatactatgcagccattctgcatctttctaatgacaagaatattctccagcataaccacaatactattattacacccaagggaattaacattgaaccaataatataaaacccatattcaactttcccacttgttccaaatcttttttatagttgtttttattttgttttgttgatgacgtaggatccagtcaaaaatcatgaatgacattttattgccatggcttttggtcttcttcaatctggaacgatgtcatctcccatctttgctttgtctttaaagacatggatattttttaagagtttgtgtcagttgtctatagaatatgccacaatatggatttgtctgactgttttcttatactccaattaaacatttttagcaataatactacataggttacactaagagtggacaaatagcaatccaaattattctactccattctgttccctgtaacattaatggcatcatcttcagccataacagggctacactctgggagtagatgactgatgagctgagagaaaacagattcctgaggaattctggatcagagcagccatatttccctgaactacaaatctttagacatttaagtgagagataaattttcattctctttgagccattggcatttccattactttcagccaaatctaataaataaatgaaatgataaaatataaaggagtcagaagaaaactaagtacgaaatccagtttatgtaaaccctgaacttctagttatataaattaataagtaaatttattacttaaacccgttggagttggggcttgttataatggttggtatgtcttgaaaacattctatttgacacacagcttttatcacatctatgaaaatgtataaaaacacagaagaaacaaatcaaataatagataccaatgataaaaatgcaaagaaagatttgtataataaatgaaaaagaaatcaaagcaagaaaaattagtgacaattgtataagaaaatgacatttagcacctcaattaggtcaaaacatgtttatttctcttttatattattagttacctgtagaatcaataaaacctgcaagggaccctataaatagttatcaaataaattgattactggattatatcaatatacataagaagggtaaaattgcattattactttttgtagatgtactagaacatctacagtgatgggaaaaaatcatgagaaaaaagaagaaaattaaaatggttgaaccagagatatgggagaactaagagaaaccaatagctctggatatattctttgaaatgttcttaacaggtcattctgtatttcttgcaatctaagaaacagattcaaaataacagattaattggttttgtgaagcattctccccattggaaagccaagaatgcttggagactcagatcctcagagagcttaaagagagacaacaaacctaagagaggcttcctcaagagggatccactatgtagataaaaaagaagataagcaagtcacaaatgccatctgccttcactggttatttctccaaatagaaaatagaaagacacctttgagataatatcttctggaaaacactgaaagagcccccagaggagaatgaaccaagggctcttcaactgcaaaaggatatcagtgtgtggacttgtatttctaatacacaaccttgaatatggctggaatattgaatttgtgtatatattcaagtgtatctttgggtgtttatagttttatgttcagtgtatttagacttttactgttatctgtaataatgccaatagaatacatgatttgcaactttagataaatctggcatctgggaatattaggctattcttctgtgcctgtattttgaaatataatttgacagtgtgtgaatttgtggagtttatgtgtgtagtttggggattttcatgtttacaatgtaagaggactaagtttgaaagtctgtaagatgcagaaataagcaattaaggaagttcttgtcatcttttgcctgagcatgttttaaaactagagaaatgctcacccctctaaatagttgaactgtttaatgctataggagcttaaaaagagaggatctttctcattttttttctcctccttgaacactgtgaaatttatggtaaaatgacagaaaaagaagaaagactaagtgaatctggtaactaaagaaagagctggaaaaaagaaaactagagggcaagaggtgataagagaggtcacctcttatcagacaggagacaagttgatggagaaaaagatctgctatgagggaaaattctgtctccagccctgcaggaagaattggaaaatcagaaaagagtgaaaagggagctagactgacttaatcttcagcccaggtaaaactggaaagacagtttaacatgttctttagaatgataggcactatcaggaagagatgaagtcagggattcaggctcagagagacaaatactcatccaggatcccaagagtgagcaagggtggaatatggactccaggcaaggctgcctaatttcaaagtccatgatattctaatagaaagggagatctagtgctgcgatcagatgcagagagaggtcatctttgcccatttcacgattccatagttgtgatttttccttgccatttcttttgtcttccagtcaaaggtatgcaggcaggatgagtgcaaacacctccatggtgactgagtttcttcttctcggcttctcccacctggccgacctccagggcttgctcttctctgtctttctcactatctacctgctgaccgtggcaggcaatttcctcattgtggtgctggtctccactgatgctgccctccagtcccctatgtacttcttcctgcgcaccctctcggccttggagattggctatacgtctgtcacggtccccctgctacttcaccacctccttactggccggcgccacatctctcgctctggatgtgctctccagatgttcttcttcctcttctttggcgccacggagtgctgcctcctggcagccatggcctatgaccgctatgcagccatctgtgaacccctccgctacccactgctgctgagccaccgggtgtgtctacagctagctgggtcggcgtgggcctgtggggtgctggtggggctgggccacacccctttcatcttctctttgcccttctgcggccccaataccatcccgcagttcttctgtgagatccagcctgtcctgcagctggtatgtggagacacctcgcttaatgaactgcagattatcctggcaacagccctcctcatcctctgcccctttggcctcatcctgggctcctacgggcgtatcctcgttaccatcttccggatcccatctgttgcgggccgccgcaaggccttctccacctgctcctcccacctgatcgtggtctccctcttctatggcaccgcactctttatctatattcgccctaaggccagctacgatccggccactgaccctctggtgtccctcttctatgctgtggtcacccccatcctcaaccccatcatctacagcctgcggaacacagaggtcaaagctgccctaaagagaaccatccagaaaacggtgcctatggagatttgaaaagggggcgatagtgacttctgtgcagtgctctgagtcagtcccaaatacctaaggatcaaagagtctcccttaaggtctttcttcacattaggggagggccagcctgtcagaaagacaaacttatctttgaaaagctaccgtagtcaaatgcgctcctcagaccctcacaacacatacatattctattccgctttctgttgcaagaaacaagaaacccaggatggaggatcaatttcagaagcagagcaagttgacaaccagggataaagttacaaaatattatccttatcagactagcaaggtaataaaattttcagccacaacaatgatccttaaagtcatttgacatttgtacgtcctaggtaaggcatttgtttcttgggtggtactactggttagtaccttagcaaacataattatacctaattaaatctactaccagctaaagacagattcctcaagaagtaaggagtggccacaaaagtttcaatgaaggtaagttcttatggaaattcatatgccgcagaggttaagagaacagattctgatgtcagacagacttaaagtcaagtcttattttttccagctagttagctaagtgatcacaggtgaatgatataatctctctgagccttaatttttttaaattttattttagattcaagggtacatgtgcaggtttgttatataggtaaatttcacctcacagtgattatttagtcacccaggtaataagcatagtacctgataagcagtttattgatcctcacccttcttctatcctccaccctcaattatgtcctggtatctgttgttcctttctttgtgttcatgtgtactcagtgttaggtcccacttttaagtgagaatatatggtatttggttttctgttcctgtgttagtttgcttagaataatgacctccagttccatccatgttgctgcaaaggacataatctgtttgttttttgttttgttctgttttgtttttatgtgagccttaattttcttatctataaagttgcggtaacaacagagtctaattcattgggtttttgtgaggatttgtagacttgcaaacaatcaagcttaatatctggcacaaaatagtatcttgatagatgtttttgttagcaagtcagacaggtcagcgcaaaggctaatgtttggctcacatggggtgactttgctgggaagagaagggtattcttgaaatatcagtggcattggaacccacaagagacccagaggaaggtggaagaagaggctctatacatcactgttaacagaaactgctacccagcacagatatgagccaaaaactaccaagacacggaagagcaaatataagggctatgatatgcaggagagtcagtgaactgcagaacaaataagtggaataagctgagagggtgaatcaaaaacagccatctccaagaggcaagtatttattaataattaaaagtgcaatctacatactttatatcattccaacactttattcaaatgcaacagtatttattgcaaactttctatgtgcctattgctctttggcactgtggagaatatcaagtacatacagggtggtgattctgtccagagagcacttgctgtcctgttaagaaagcactgattctcatgaaactatcagagaacagtttgcaaagtaagaaaacactcaaaatgtaaagcgaaaagacaaaggtgttactccctgtccccaccccccaaaaggggttgtgtggccttcctcaaactcattttatcaatgtggaaaacctcacaactactgctcttcaattgaacaaaactgcaatagcgaggaacagcatttaagaagggttgcctaaaggattgtcaaaacagcttttcctctgataatttaaaatctaaatcttatccccaagctaaagcagatgagcacagagctacacatttaaaatgctgaaatatttccacttcctacatatctccatcaactcatctttcctagaactggtcttgctaaagagtgttttggcattaagccattggtttacattgagaaagattacaagaagcaacattatgaaactctcagagggatcatttttctcatatctcagtgataggaatcactgtatttttcctgtcatataagcaataacatttcctcacagttttatggaagtacaattggcatatgacaaattgtacatgtttaagtgtgcaatttgataagttttgacccatgtatgcaccatgacattataggcgcaatcacgaaatgaacatatccagcccccgtgctccctcacactccattgtaatctctctctttcacccctccctgcactcctcattcccaagcaacctctgatctgcttcccagcactatatttttcttttttcagagttttatataaatgaaattataaaatatgtactctttttagtctgacttatatttggagatttggccatgttgtggtgtgtacagcagccattccttttcatttctgagtgatactccattgtatagatatgacataatttgttcatccattcacctgctgaaggaaatttgggttgttttcacaattttttattcattcacctgctaaaggaagttcaggttgtttccagtttttggttcatagaatgaaggttctatgaacatttgtgtacaaagtctttgtatgctttcatttctctggggcaaatacatagatgtgaaatggctgcatcacatgggaagtgtatgtttaattttttaagaaattaagtaatcacttttcctcttaacatgacagctagcaagtttccacctgaatttgtaactcatctccaggaaatgtgcaattcctcacgatatatttttgagatatctagtttctggtctcacttgctgttgttgttgttgttctattctacctttttctttgtccagtctctctcatccttattttctgtacatttatgtaacccagcacattagtctttctggagcaagacttagagccaccaatcagtaattaaaaaaaaaaaaatagacaggggaaagtattgaatggaaaatccctggttatatggtttggctctatgtccccacccaaatctcatcttgtagctcccataattcccatgtgttgtgggagggacctggtgagagatgattgaattatgggggtggatgtttcctgtgctgttcttgtgatagtgaatgggtctcacatgatctgatggttttagaaatgggagctgccctacacaagctctcatttttcctgctactatccatgtaagatgtgatttgctcctccttgccttccaccatgattgtgaggcctccccagtcatgtggaactgtaagtccaataaacctctttgttttgtaaattgcccagccttgggtaagtctttatcagcagtgtgaaaacagactaatacaccttggtaaagattgaagacatgggttgtgatctctactccgttactaaaactttacaggacctagagcaaactctttgcatcatctttttggttttcaatttcatcatcaataaacataaaggctaaatcaaatgagctctggattgagttccagatccactattctgtgcttatttgtcccaaggactatatgcttcttatagctgatactctcacaaagaaccagaaggaagattgcagcaaatgctctttctccaccatagatagctaccaagggaccttgaactacattaatcctgggcaatataagcacagtcattggttttcaagacaaacaccactcaaaagctagggagagtccatcagtgatccccatattgagtcttcccccactgtattctaccttcctgaacctcacatctcccttactcacacctgccattgcccctgagcaaaacttgacctgcttcttgaaatcccactgctctgtccctaatatttcctcctaccaacctttctccctgacactcccttcctcaacttccctaatcccatgggacccactcactatagtgcaccccagctcctgatggtatctgctaccagaagtatcctcattctttctttctttttttttgacaggattttactcttgttgcccaggctagagtgcagtggcacgatcttggctcactgcaacctctgccttctggtttcaagcgattctcctgcctcagcctcctgagtagctgggattacaggagcctaccaccatgcccagctaatttatgtatttttagtaaagacggggtttcaccatgttggccaggctggtcttgaacttctgacctcatgatccacctgccttggcctcccaaagagctgggattacaggcgtgagccactgtgcccagccagtatcctcattctttagctttgcagaactgaagtaagaagtgactgtggcatcagggagggagggtagaagtcagatggaagggaagggagaaggagagaaagaagaaacagaggcaggctgaagaactgagcagagaaaagagaaagaacaaaaaagacctcagaggaagactcaccggctcacaaggaaagccatctctgtgcatcccaggccaatctcttcacagggcttggagaaacctcccaaccagagctcactcccacagtctatgctcactgcttccctgcatcagctcctcctgtggcagcatggtccccctgcgtttctgctccccactgagctctctgggattcacaaatcagtgccctagggagggcttggagagcctagcacgtggggatcttacacaggggccaggaaagggatgtaggactcaggaagagacactgaacaaaggctgtggctcagtcctggaaatgggagcgtgtgcttgtccattgccagcctctctgcctctctaggttgtgtgccctcactggccttaactctttccagtcagggaagactaggaaagagttggaagaggaaatattgtagaagaaagaagagaactcaggtacatcagggccaccaagaaacaggggctctgggtctcccagggacataaggagaaggattaggagctgaccaggcttgctacacaaaagattccagggttgatcctctgagagttgagaaaaacagaaagtgggatctcagtgcaaacttcaagcttcaaagatgccacccatcatctattcaactttttttttcttttggctaaccctttacacttctttcaagtctgcgaataattatcaagttcccacagtgtgccttattctacatagtgctggcaatctggtcaacttcctttgtatttctcctctgctcagcttttcagtggatcctcttcattctccttcattctcactgcagcccagacccacttcctcccttccctgagcttcccttgcctatctccctcctcatcacccaatcccatttcctgcaagaagaggcaatattattaatctgtctcatctaccataaccaccacctggtttgtgcaatagcattttctggatgtttcctctcctggcagccaggactgacaatgtcacctgccaggggcctggaaagccaagccacaaccttcttaaccaattagaggcactgcagagaagcagcaggagtcagggcacttgcacccaagaatgatagatatatttattcaccacatatgtatggatatagttagagaaacaagcctcaaggcacaacgattgactgaggttagacattcggccacttgagagaatgaggaggtggaagcacagaagttaaaagtcatctctctcccatttgcttcaacctcagcatgcctgaaaaaaacatggttgataatataccagtcagtgaccaagccctaatgaaatgactgacttaccaatactgacttctcaggaggctgatttagagccaaagtaactgctgagttctgaataagcagcacacctggtctgcataataagatccattttgcaatcaccctcttcagaaagccaaataataggtcaaaaggtggtttagaacccaagcagcggaaataacacagttgaggactctgtcgaccataggcaccctgatggacctaaataaattactcaacttttcacgagaatattttacctaataactggaacttatcatccagaacaatgttttctgcctctttgtttttcagttcatgatattcctgtggactggctttactcctaatttccgaccccaataagatcctggtctagttcttggtatctagacctaattccccatttgcataaaagaatacaaatgataaacatagaaaccctgaccatccttgactccaagggtaaaaatactgccctaggcaatcatgatgcctcttatttactgcctttcaaatagaaactttctaaagcagccattgggaaatagttcatttttgcaatggaccacagatacctatacacattgggcttatcattttgatctttattcagctcctaaaaatagtcaatttgaaaaatggggtttgcattgacagttttatattattgatgccaatttggaattttatacttgataatatttatttgttgaatgaatttgaacgagtggtagaagactcttctggctggagcacttttaagtcttgcactagcatgggtctggaaatgaactgaaggaggactagagataagtacaggggtgcgtcccaattgtgaatgagaatgcaggccatatactctttggagaatcaccattatgggccctctggcagtataaatgaggacattgtagagttattcttctgtattatccaaagagaggacctaaaacaaattagtgaaataaatactgtaggatttctgctagatgatgaggcttttaattcttcctgtttctgggatggcctggctgggcctccttaggaactcagctcattccccattcctccttgacactggatatgcattctttgcattccttggctttctctctggtgttctatagaaagtaaatgagtcacagttccttcagttctttcttttagccagtctatagcactctactggtcatcaaaaaagatccaaaagtgatcaacatgaccctttcttttttttttttttttttttttttttgagaaggagtctagctctgtcgcccaggctggagtacagtggtgtgatctcggctcactgcaacctccgcctcctgggttcaagcgattctcctgcctcagcctcccaagtagttggaactacaggtgtgcgccaccacacccagctaatttttgtatttttagtaaagatggggtttcaccaagttggccaggatggtctcgatctcttgacctcatgatctgcccacctcggcctcccaaagtgctgggattacaggcgtgagccaccacacccagccacacgaccctttctaaggaagtgaagatggcacatggagaccaagtacagaaaggactactgggggtcttggatggccctccaatgctgttgtctctccagttcctcttggataattctggtgtccatgaattattatgttgccacatttggatgccccataagggtcacttgagaaaatcatgaaatctgggaaaggaagggcaagtcatagaatcctgccactatagaataatgtctgacaaccaagtgatacattctgtttaagtaggcaccaaactgtcggcaaaagccccattttcgagttggccagttctggcaattttctgtgtccattctgcatgccactcaactcctctaatgaattcttattccttttcaagccttctgtattccttcttatcatactggacactttgacctctggtgtcctagaactcctgcttcccatgacttccatctccaattccaataaacaccttctttttaaaaatttcctgatattacccagtagctctcatccctatttccctttgaagtactcatgttttttatgatcccttctcccaacacttttcttgccttcaatgtatttttaatgactggtgacctcttacctctccttcttttactttaacctctaacttctcctaatcaatatgccttaaaactctttcagtgaaggcaaaatgatgaagaaagtagaaatatcagtggtttccagaggttacagcaggagtatggggtcagagaaggaatgatgaatagaaagcacagagaaccttggggcagtcacactattctgtatgtactaggattcacttgtccaaacacatagaatatatagtaccaagagtgagtcctgaagtaaacaatggacgttgggtgataatgatatgtcagtgtaagtttatcagttataacaaattaccactctaatatgggatgttgttagtaggagagtccacctagggaggaagggcaggaggtatacagaaaacctctctactctctgttcagttttactatttaaagaaaaggaaagaagaagaaaacttcaaatacctccctataatcctatactaaatgatactctagctatcttgccccctcttaattaccagaagtttctaatctctacatatgttaagtactcaaaaaatatttcaaaaaatcaaatatcaaaaataaattactcaagctacgtctcacaaaaaagtatctttctttcccagttatgatttttcttccttcttctgatatcctcacaactgaacatttccttcgaatacacccacccacccataaatgaccaatctttctcttttttttgttgttttggagatggagtctcgctctgactcccaggctggagttcagtggcatgatctcggctcaatgcaacctccacctcccaggtttaagcaattctcctgcctcagcctccagagtagctgggactacaggcatgcaccaccacgtccagccaatttttgtatctttagtagagatggggtttttccatgttggccaggctggtcttgaactcctgacctcaggtgatctgcctgcctcagcctcccaaagtgctagtattacaagcctgagtcaccgtgcccggcccaaatgaccatctttcttaccactcatccacaaagctcacaaaacgagaagctgctcaaaacactgagatgcccctctaggctggtaacagcgtgacttagaataagtcctccaacttttctagctttctcaccgaaaaatgggcctgtggcagcacagttttatgagtaactaagatatgggatgtagaaagaccctagaagaggaaaaaaaacacaacaatggtcattgttaaaacaggggactacatttgtccttggttccaccactgtcccacagccccagctggtagtttggcttctcccatgcagcctccctcttaggcccaaccatagtatcaaaactctcaacagctatcccagacctgctgggtcatccctcacaacagaaactcagtgtttgggtagagtggagaggcttgtagtgatcttaactttcctgagaatgctcagcctaattatgtcccgggtatagaatccaacctcatccttgaaaaactgaaagctgtccacagctataatcctaaaatattttattggaatcttaaaagcagacatatgttcattacaacatccactgctctgttaagtactccatctggcatggcacagaatatggcaacaatgtccaagctgagagacaaatcaacagtgcaattacattcacaatagccacacacacacacacaatacctaggaaagcagctagacagagagatgaaagacctctacaacaagcaagcattacaaaacactgctgaaggaaatcagagacaacacacacaaaaaatggaaaaaacattccatgttcatgaataggaagaatccgtattatccaaatggttatatgacccaaagtaacttacagattcaatgctattcctattaaactacccatgacatttttcacagaactagaaacaactattctaaaattcatatgtaaccaaaaaagagcacaaatagccaaagcaatcctaagcaaaaagaacaaagctgaggacatcacattatccaacttcaagctatactacaaggttacagtaaccaaaatagcatggtactgttacaaacacagatacatagaccaatggaacagaccagagaacccagaaataatgccgcacacctacaaccatcttatcttcaacaaagtcaacaaaaataagcactcactattcaataaatggtgctgggctaactggctagccgtattaggaagattgaaactggaccctttcctttcaccatatgcaaaagtcaactcgaagtaaattaaagatttaaaagtaaaacctaaaactataaaaaccttgggagaaaatccagcaaataccattctgtacatacaaatgggtgaagatttcatgataaagttgtcaaaagtaatggaaacaaaaacagaaatagacaagtggaacttaattaaactaaagagcttctgcacagccaaagaaaccatcaagacagtaaataaacagcctacagtatgggagaaaatgtttgcaaactatgcatctgacaaaagtctaatatccagagcttataaggaacttaaagagaaaaaaaattttttttaaatgggcaaaggacatgaacagacacgtctcaaaagaagacatacatgtagccaagaagcacatgaaaaaaatgcccaatatcactattcattagagaaatgcaagtgaaaaccacagtgagataccatctcatatcagtcagaatgactcaaaaaataacagatgctggaagcatcgtggagaaaaaaggaatgcttacacactgctgctgagaatgtatgttagctcatacatgctgctgagaatgtatgttgaaagtggtttggagatttctcaaagaacttaaaactgaactgccatttgacccagcaatctcattactggaaatatacacgaaggaatataaattattctaccataaagagtcatgtatgtgtatgtgttcacaatagcaaagacatggaatcaacctaaatacctatcaacagtggactggagaagaaaaatgcatggtacttatataccatggaatactatacacccatgaaaaatgaaatcatggcctttgcagcaacatggatcctgatggagaccattatcctaaacaaattaaagcaggattggaaaaccaaatgctgcatgttctcacttgtaagtgggagcaaaacattgaatacacatgaccacaaagaaagtaacaatagacaccagggcctacttgagttggaagaatggcaggatggtgagggtcaaaaaactacctattggttactgtgctcactacctaggtgacaaaatcatttgtacaccaaaccccaatgacacgcaatttacccgtgtaacaaacctgcacctgtgccccttgaaactaaaataaaaattaggggaaaaaaaggagaagagagataaaagggcaaacaaaaaaattgttcaaaaaatgttggcaaaattttttcaaattcgataaaaatagcaatccacattatcaataccacatctacatacatcataaactgagaaaaacaaagatttaaaaagaaaaatctgaaaacccgctgaagtggtagagacatattgcataataaggaataacaataaaaatgactgccaacatctcaacagaaacaaagggagtcagaaggctatgaattatctttcaaatgtgaagagaaaaaaaatctgccaacttagaattacccagtgggggaaaataatctttcttaaatgaaggcaaaataaagccatctgaaattaaaaagaagctgagaaaatttgttgccagaagatactcactaaaagaataaaaaaggataaaggaagtttttcaggctatagagaaattataatatttggagtttcaaatctatgagaaggaacgaaaaactttcaagattggaaacataaaagtgtatataaaagttatcttcttccttttcttaaattcattaaaagtctaaaaataatgataatatattacaagggttgtaacatatgtaaagtaaaacacggcaatagctgcacaaagaatgggaggaattataactaattttattattatcagatttttatattctatgttaaaggtattgtattaagtcagagtagactcttataagttcaggatccatatggtatccccaagaaaaaaacttgcactttaaatataaagacagcttaatcataaatacacttatagattaaaaataaaattataatataaattatgaaataaataataaatataaattaatatatatacattaaaaataaaattcaccagatatggtgaattaaagaggacagcaaatccttccttcctccacctcacaaataaattataaaaccagaaaaattgtcaaaaacaatcatttcaggtgtctggaaataaaccaaggcaaataataaattgagaaccactttttcataaagcagtgctagaagcttaggtaagaatcataggtaactgtgcctgtcctgtgaaaagtgctccagtactactccaacttagttgatggtagttttgccagtcaggaatggccatgaaaatcaacaattacactattaaagagggttgagatgatttggaacaaagataaaaactcatgcctagggtttatgtcagtaaaagtaacaaactcaatcgtgtttaaggctcaggtatccagaggttacagttttaatgaggcgaacagtgaacctatcagaaatgtaatgggaagatgctgggaattagatagctatagaagaattagataagatctctacacattcctggctgactgggaaactacaggtatgtacagaagaaacatgagagaaaccagcatgaagtaaaatccaagacaaacttaaaagctctctgaatttgaatatggtcccagcacaaaggcagatgcattagcagagaatggaagccttttgaaatcaaaagtatttgaccaaaaccttcacccaatcattgactgaacactaagctgtgcaagaacaagggaaacttctgggatccaagattttaaaatatgaatttttaagagctaggttgagaccatggaagccataaatggtggaagatacacagtccacagattatgtccaataatgttaacaaaataattcttagaaaaaaataagaatataaacttgtcaatatagtatctaaaatgagacatgcaaagaaacaggaaagtataatcaagtcttagagaaaagactgcagttaatggaaactgactgtaagtgggactgctgttgaatttagcaaacagagattcaaaacatctaatataaatagttaaattaaaaccatttttaaagaattcatggacaatatagtctttcattgggtagggaagatccactgtcaatatagatgggtatcatccaatcagctggggcccagatggaaaaaaaaggcatgaaaggatgctctttatcattggttattaagaacatgaaattaaacacaatacttacaagtctactagaatgactataataagaaactgatggtataagatgttgacaaagatgtgaaatactgattaagtgttggcaagaatatgtcaaaattgacagagccactttggaaaacaatttggcaggttttttataaaaaaaatttactatacaacccaataattccactgtcaggtaatatccaagacaatttaaatcatatgccttcaatgactcttcataagaacattattagtaacacccaaaaagtagaaacaatccaaatgtcatcaactggtgagatcagtggaactgaatagaaagtgcagaaatagagccaaacacataagatctattgattttacacaaagacaccaagataattcaatacaggaaacgatattctttgcaacaaatggtactggaggaaccagatataggtataaaaactgtaccattatgatttgtttaaaaaagcagccattttttttatcgcttctcggccttttggctaagatcaagtgtaaaaaagcagccattttcataatattttattatatgtatgaaaatgaattatgactcctatatcacaacatacaaaaaaattaacatgggtcatataaataaacatataagctagaaattaaaagcttctaaagaagaacataaaagaaaatatttatgaccttagaataggtaaagatttcttaggattcaaaaagcacttaactgcaaaaagataattgatgaattttgagttaatcaaacttaaaagcttcttctcctttgaagacgccattcaaattgaaacatcaaaccacagactgaaaaaatagcacagtgcatttatttgacaaaggacttttatgcagaatatatgaagaactcatatacttttatcataaaaggaaacactataaaatatggacaaatgacttgaacagacacctcacaaaagaatatataaatgaccaatgaaaagatgctcaatgacttagttgttggataattgtaaatttagaaactactgtgagattaataagtctagagatctaatgtatagcctgaggactacagttgacaacattgtattatatactggaaatttctaagagaatagattttaagtactcttaccacaagaaaagtaactgtgagttgatagatatgttaattggcttgaccatagtaatcatttaactatgtatatcaaaacatcatttgggaggccgaggcgggtggattgcctgagctcaggagttcgagaccagcctgggcaacatggtgaaaccccctctctactaaaacacaaaaaagtggccgggtgtggcagcatgcgcctgtaatcccagctacttgggaggctggggcaggagtatcgcttgaacccaggaggcggaggttttagtgagccgagatcgtgccattgcactccagcctaggagacagaatgagacttgtctcaaaaaaaaaaaaaaaaaaaaaaggaaatcctgtatatcctaagcatatacatatacaacaaaaaattttcaaaattagcctggcttggtggcttacacatgtaactcagcactttgggaggcctaagcaggtggatcacctgaaatcaggagttcgagatcagcctggtcaatgtggtgaaacaccgtctctactaaatatacaataattagctgggcatggtggtacatgtctataatcccagctactcaggaggctgaggcaggagaatcacttgaacctgggaggcggaggttccagtgagccgagatcacaccactgtactccagcctgggcgacagagtgaaactcagtctaaaaaaaaaaaaagccgggcacggtggctcacgcctgtaatcccagcactttgggaggccgaggtgggcggatcacgaggtcaggagatcgagaccatggtgaaaccccgtctctactaaaaatacaaaaaattagctgggcgtggtggcgggcgcctgtagtcccagctattcgggaggttgaggcaggagaatggcgtgaacccggaaggcagagttttcagtgagccgagatcgcgccactgcactccagcctgggcaacagagcaagactccgtctcaaaaaaaaaaaaattaaattaaaaagctataaaagctataatgagatatcacctgatatccactagaatgtctatcacatgaccctgaaattccacaaataggttttgaccaaagagaaatgaaaatacacatacacaaaagacttgtacatgaaagtttatagcagattgattcacaacagcaaaaactggaaaccaccccacactgtttctctattacagcataaaaagttatcccaaaacttaatggcttcaaacaacaaatatttattatctcacagtttctatgggccagcaattcagaagcagctaaatagtagctggtgattctagcttaggatctttcttttaactttttaaaaactttttgtgaatacatagtagatgtatctattttaggatctttcttgacattgtagtcaagaagtcagctgattgtatttctaagatttggatgaagctgaaggattcacttacaagatgtcccagtcacatgttgcacgtttttagtagggagccttagtttctccccatatgtgtgtttccattcactgctaggatggcttcctccaaagtaaacaatccacaaagaagaagtcacaatgttactgtgacatagtctttgatgtcacatcccatcgtttctaccagattctatttgttaaaactgagtcactcagtacagctcccatgcaaaggtaagggaagtaggctctactttgtgaaggggatataagaaaattgggggccatattttaaaacaaccacaaacctgaatgttcatcaacaagtgaatggatgaaaaaattgtgatatatttaggcaagagaatactactcactgatatttttaaaaaagaattggactattgatacacaaaacaacagggatgattctccaaactgtggtacagagcataacacaccaaacacaaagagtatgtgctgaatgaatcttttatgtgaagttctggaaaaagcaaaacaaaatgatagaaatcagagcagtggttgcctagagcatggggagaattattgtaaatgggcatgatgaaatttctggagtgatggaaatgttctatatcttcagtagggtaatggttgtctggatgtatacatttgttcacattcagtgaattgtccattaaaatatgtgcacttcattatgtaaattataccttaattttaaaaagagaaaggaaataaaccaaagtcaggggggattgaatgagcacattcgaggcttgagaggaaggctggaaatatgggacactcagaaggtgtggatcaggagagaatagtgcccttttactccccagtgacacggagaagcagtggtgacctttttatatgccaaagggaactcagttgctggcacacttcctttgaatcttcacattccttcttaaccattagtagctgtggccaattagctgtctataggttatggggcacctagtcttggcagaattaatgagctacttctctctatgggatgggagtcttgggattcctccccccatcatctcactatgcctttttttctgcctttaatgtcactaaaagagaggttaacttactggattgaggaaaagaagtcgttagcaagagttccatagtaaagcgctaactctagctcatgtgtctggcagagcaatggtggaatgtggttagcgcatagcttcttcagccagcccacctgggttaaaatttggtctttggcgcttactagctatactttccagaacaagatattcaacctctacatgtcttcaattattgatctgtaagggaaggtaataatagtacccaccttttgaagttataaggagccgtaaatatgaagcgcttttttgagtgcccatggaagtaagcactagcaatcaatactcttaactgaaatccaagttccaataatcatcaagagtataacattcctctttagtttgcttttagttctcattgtgagatcacaagtggaggctccaaccagtccagaagttcctttctatggggaagctgtggcagcaaggccgtgaagagagtctgacttaattgcaagtaagtcacaagtttattcccctacagcccatcaatttccacatgttcttaagacagttctgaatcaaacagggtctacaatcctggcactgacactcattggcagggtaaccctgggcaagttacttaacctctttgagactgtttgttcttctgcagagatattaactgtctagcagggttcttttaagaagcagatattccaggaaattatttagcacagtgttagtatataggacatcaacagatagtaactgtcaaaactataagtggttattattattgaactgtagggcagaatttgtctcataactttgtagcagttagtacatgactggctctttgaggaccaaaaaagaataaattaatgtgcttctgtgtggagttaatgggatgtagggaaagtagtgcttgcctattattggtgtcagagaaaaggaccagaagaaacagggtaaggaaaaggcatgttattaaagatagaaaataggagagtgcagagggtcaaaggaagatataaactgaagagattaagaaaaaacatacagtgagacaagttgccaagagagtaagaatgtaagaaatgctgcagtttatggatgaataaaactctggacaattgctgagacacaaaagatatgaggctgcaaagtttaaaaaggaacgatacatttaaaataatcagaatagtgtttacttcttcagtgggagagaaggagatgtgatcagggaggagaacacagaagacttctaagataccagtaatatttgatctgttcttaaatcaggaggagattcaggtacaccatgtgtttattattccataaaatccatagatgtgttttatatactttttgtttatatgatttttaaaaaattaagggaacaaatcttatcctcaaggagagacgtaatgatggaggaaggaatatagaaggagacaaaaaggagggagtcttgatgaaaagggagatgggaggcagcttttaacaccagacagggtcctgtgatgcagaggtgattgtgccatcccataaagtcccagggcactgtctgccaatgagaccaccaacttgcttgccctaaatggccacatcccctaaacggccctcctgccattgtctgtgctcagaaaaccctcagtttctgcctcttacctgccagggtggtgccgcatcccacccccatcattgagcttgcctcatgtgtctcagcacagtcttttacagcaaaaatgcatgtcacctcctcctaaaggctttccgtggcccacccacccagattcctcctttattgtgcagactctttcctaacccacacctcatcttaatttatttgccttcaattctgggcggcggtgttggggagggtctcaattttcccatgtatttcccagtgtttattgaatacatgaggccatactcttctagtctctctgcttctcatgctaggaactgaaccgaccagcctatactttaaggcttgttatttcactgactaaggaaaggctacttaagagggcaagctcagacatacataatctggagtggatcttccatgggaaaacacgtatataacagaaattattggcaaaactataagtatggtctacagagtaagtaataatattttattatttatttagttagttttgagacagagtttctctctcgttgcccaggctggagtgtaatggcacgatctcagctcactgcaacttccacctcccaggttgaaacgattctcctgcttcagcctcctgagtagctgggattacagacacccaccaccacaccccgctaattttttttttttttttttttttttttgtagagacgaggtttcaccatgttgaccaggctgatctcaaacatctgacctcaggtgatccgcccgcctcagcctcccaaagtgctgggattataggcgtgagccaccacacccggccaataatactttatcaatgttggctttcctgtatttagtaactgagctgtttttacactaaaaaaaaattctatcttagaaacatgaagaagtgaagaggcattatatatacaactcactgttcagtagctcagggtaaatataattgcatatgcaaagataaagatgtaatgataaaaatgtcaagtgttagcactttactaatatagataaagaacattcagaaattctttaaattactcttaaaatttgggggtatgaatttttataaaaataatgttttaaatcttaaatagtgaatagaattaagaaagtaacaaattctaattccttcctttttttctttaaattcttctagatcctgaataatttctacttaaacgtcccaatatcaactctctattttgctattgacataatcttatttgagaggcaaaaaattttaaaaattatatcatctttttaatttctaagccccagaacaagacaattggcagcatttttttcatgtcattttgctacattctacataatgttaagttgaggttagggattttcatttgtggaggaagctcttacatttagtttaatgaatcataatttttttaatggagaaggaacaaaatacctcattgatttttctatgagtggagttaatacacacagcggagaaatctctttgttaattctacactctgcctctgattgacacctctgcaaacaaagataaagtagataaaacatgaataattccaggaaacttatgccccagaatacagaataattttgcatacatatgaatagtagggcaattctatcaaatgattcttttctaattctttatggatgtacataatgaaatattcagaactaccacaacatttagaataagatagagcctaacaatttattgttgaattaatgaagatcggttaattaatccatgttttacatcagctttctttgccctcaaccaggaagtcagaggcaccaatgtgaggttccacctgctttccagcacattcttggtttcctcacttctgctagacaacgtttgatcagaaggaacagggaacgagaaggagctgctggatgacgataagcctgggaaagggaggctgggtgagcagagacagaaaagaaacacctacctgctgtgacctcacaaacacccaggctgagttttgataagacaggttgaatcacactggggtgacagcctcatccctccaggtacaaacaagaacaggccatggttaaccaaagctcccccatgggcttcctccttctgggcttctctgaacacccagcactggaaaggactctctttgtggttgtcttcacttcctacctcttgaccctggtgggcaacacactcatcatcctgctgtctgtactgtaccccaggctccactctccaatgtactttttcctctctgacctctccttcttggacctctgctttaccacaagttgtgtcccccagatgctggtcaacctctggggcccaaagaagaccatcagcttcctgggatgctctgtccagctcttcatcttcctgtccctggggaccactgagtgcatcctcctgacagtgatggcctttgaccgatacgtggctgtctgccagcccctccactatgccaccatcatccacccccgcctgtgctggcagctggcatctgtggcctgggttatgagtctggttcaatcgatagtccagacaccatccaccctccacttgcccttctgtccccaccagcagatagatgactttttatgtgaggtcccatctctgattcgactctcctgtggagatacctcctacaatgaaatccagttggctgtgtccagtgtcatcttcgtggttgtgcctctcagcctcatccttgcctcttatggagccactgcccaggcagtgctgaggattaactctgccacagcatggagaaaggcctttgggacctgctcctcccatctcactgtggtcaccctcttctacagctcagtcattgctgtctacctccagcccaaaaatccgtatgcccaagggaggggcaagttctttggtctcttctatgcagtgggcactccttcacttaaccctctcgtatacaccctgaggaacaaggagataaagcgagcactcaggaggttactagggaaggaaagagactccagggaaagctggagagctgcttaatatactttcgaaagtaagaagagtttcttcaagatttatgaacatgttaagttttccagactactacccttcccacatacacctgagccactgtggtgggtcacagtgtggctatgttatctatgagagggagaatgagaaagagagggacagagagataaaagaaattgggtgagaggagataggtagctccataaggcacacaaattcaaatattatcattcctatcactgtccattcttaatatttctatcctccattctgttctttttactgtcatcacttctatagatttcctaactccaccatgcctatttctggttatataattgctctccaattgtcatgtcagtgtaggggaactactccatcatagcattctggacaccttgcatgtatctacgtaggtcatgtaagcaaaggcttgaagaacagctaatctgagatttagaagaatgctttttgatcctcctggaatatgagaggatgggaggccctttagaacctgcctcaatgccatctctcactctccttcttatatccctgggagtatgtcatgtgacaagtctttactgtctcccaggttttggatggagcatggggttttctgccccacaccctttaggatatagctgaagaatataatgaggaatagctggattctagaactgactcctcaccagtggtatattccacaacagtgtcacagtcgtctggcccctttggtttccgtgtcatcctttttggtgtgtaggacaaggagccagggaattggcacgtttggcttttacttcttttttatatgtaaataataagccatctaagtgtaaaagtggctcatatcttctccagccaaatcagctaggccatggccttgccttgcttctcatgagtgtgcttgacagtcatcaccgtcactctatcttcatttctggttcttaccgtgttagcttagttcattcaagctactatcacaagctacacataaattgggtggtttataaataacaaacatttctttcttacagttctggaggctggaaactccaagattaaggcagatttcatgcctattgagggcctgctttctgattatagaaggtgacttcttgctgtgcccacacatggtgaaagggactaccaactctctggagtctcttttatgagggcactaattccaattatgaagcctcttccctcgtgacctaatcactgcccaaaggccccatgttctaatgccatcatcttggtggtttaggatttcaacatatgaattttggaaggacataagcattcaaccccctgcacatgtcttctttcctacttcctcaaggttctttctgtccagttgctccttcttctattgacccttttttgccttctctttctccttcactgcctcaagttacagccagaggaaaggaggaactaaaacttagcaaatctataatcacatgcaaatacacagaatggattgttacaaccaaaatgcaggctctattgttttcaatttagcagcctttcaaatgtatatggttctggccacattaaagttgcaaataacactttttttgagactgaaataaaggtgaaatattggaaggaaaagtttaatgttttatttgtagtatttttttccattttccactaaagagtccagaaaaaaaaagcaaacttaatataacctttgagttataacagaatatttcaacaagaactttgttgctatcaagtaaccatatagtataggttacacagaactcctatcttctggattaagactccgtcttcaaagtatttgggcaccctggttactgaacatgagccagaagaaaatgaactgcttttccttaagcatctctctacccctgggtcacctccagtggagtggtatgtcaagaaatgtaatttgtcctttctgatgccataatctaccatatttttttaaattaagtcatgccaggaggagatttctctgctcctcatcacatgtttccaccagaaacatgggcagctccgcatcttgggcttcaccacctttaaggtgaggtggatggtcttcttcttggaaatttcataagacgatagcattttcttgggctttggggtcttaaagcccagcagaaaaaccaagtcctgcatgggaaccttggtcttagaccagagctgttcacctaccttcttcactccattttagcagccaatgtcattaattcccattcctcacaattgacactcatttaggcaattctatataaagttaaaatattcttcagaaacgaagatgaagtaaagatattctcagtgaaagtaggtatcaccaactcatctgatttaaaagaaatgcttttaagcatggattgcactgcttcaggcagagaggaaataaaaccagagggaaaatcagaatatcatgaatgaaaaaggaacaacagaaagagtaattatctgggtaaatgcaatcgtatattattctctttttgaattatttaaaatatgtatctctgttggaactaaaaagtacaacactgatggggattcatacaaatgtaatacatatgacaattactgaataaactaataataataaatggatctattcattctaagtagaccatgaaagggtaaatatttatatcataatccctaaagcaacaattccaataaaacaaaaaaccatactgttgttataggcgtttgaaccagagtgactccatcttgagtagtggctgggtaaagtaaggctgaaacctgctgggctgcattcccaaaaggttaggcattctcagtcagaggatgagataggaggttggcataagatataggtcacaaagatcctgctgataaaacaggatgctgtaaggaagccggccaaaaccaagatggcaatgaaagtgacctctggtcctcctcactgttcattatactctaattataatgcattagcatgctgaatgacactcccatcaatgccgtgacagtttacaaatgccatggtaatgtccagaagtaaccctatgtaatctaaagaggggacgaactttcagttctgagaattgcccaccgtcttcccagaaaacttatgaataatccactccgtgtttagtatataatcaagaaataactgtaagtatactcagttgagcagcccatgccactgctctgtctatggagtagtcatactttattcctttactttcctaataaacttgctttcattttatggactcgccccaaattctttcttacatgagatccaagaatcctctcttggggtctggattggggcccctttccagtaacacagtgacatcaacaaaaataacagagtaatgacttccaaaaatgacctacttcctaagagtaaaatgaactatggaagaattgtcagaattaatattgtttagaactctagaaattaaccaaaggcttgctgcaatctggggagtgtttgttcaagaataatagctgaatcttgataagaacagtgagctctgtgatgttttaactggttccactcctgttccttcctcctcagctcttaaaaaccaacggtccacaatcatggtgaaaaccagcagacatgaaatcactggaggggacacaatagggttacagatcctttaatcccttatttccagaggactgttattattttacctgtctggttgttccctagaactcacaatgctatccttatttgacttgactcagagctatcccagagagaacaatgtatttcctggggaaatgagtaaaaagaatcataggcagttgttgaacatcatggttgccgatggtcataaataacagttggaacaaacaatagcctaaccaagaacttaaaaacgaaatgtcagggaatgagatgcccataaaggggattgaaaagccttaatatactccagaaagttccgacggccacatgcatgcatagatgtgggcatgacaagtgctgcatatatgctttgaacagacctgagcaggctctaagctctaaccctgaataagtttgaggcactgcacagacaggaaatgaaggctaggacacagtgtaaactgcttggttgggctttgaagacctgtatctacctgcacacagagcctctctacatacactgggagacattacttccaggaacctaaggaaatctttgtccagtctttacctggccactaagctaaccaagcagagacttcagtggccacgttgaacaacaacaacaacaaaaacaaaacaaaacaaaaaaacaaaaaagaacagacttgacagatagtttttaaaaacctgatcaaaaaacatccactagcaatagtaaaatctgggaacagaaaaaatatgacttccagagttgccacattatactgtttaaaatgctaagttaaaaaagaaagaacgaaataatacaacatgcaaagaaacaataaagtaaggcccatacacagaaaaacaagcagttagtagaaactgtctctgggaccaggctctgaaggaggtgtctgcctcagtgcatccaaaacagccaggtaacctttgctttgggactgaagtaatggctctgattctgagatgagagctcacactagcccttaatttaatctttacttgaggtgaaattcaatggattattagaatgggccctaatccagtaggactagtgtccttataagaagacgagattaggatacaaacaccacaagggacaacgatgtgaggacacagggagaagatatccatctaggagccagggaaagagtcctcagaagaaacctatcctgcccactccttgatctcagacttcctgcctcctagaaccgagagagaataaacttctgtagtttaagctactcggtttgcggtctcagtcacgggagtccaagctgatgatcacagttgtgatgagaactttacaaattgaatcatgggaagtcttgcaatagtgagatctacgacctggtagatcctataatcctataatctgagatgctgattctacaactctgagctgctaacgctttgcttctgggtcacagaagcttctggaaataaacttgtcccacaaactgataaatgcctgtgatttttctagaaatatgccacaggcaaccctggcatctgcagtcacatgtcagtatatcagtggggtttcaggagaagtttagggatcagctccaagtgaacctagtgtttcaatcttccctccttgctgggatgatggagtccccttcagtcaaggctctgttgaaatgaaagggtctgttcccagttccactcttcccacccagggttctggactgttaatggttgtcctttttttgttttcttcccgttgattcttttaccatcttcctcctcttactgattttgcgtgaaggggggttttgatggaggtaaggtagctgataagaaatgaggtagtgagaaaactagtgaggggtcttctggctgtccccagacagtcctcgtgtggtccccagcccagcctgcaggttctgggctggctacctcttggcctctgtgctgtgtgtctagagctggcctctaagggaagggccctgtgagacctggcagaacagggtaactggtccaacaaacatccctcctttcctctggctccacagctcaggattagatctagatagcatgtccagtaggtgccagactacctcattatatcctgtgagatgggcccagagggccttgaggtgggtaagcttgaagctgggcacccagagcctgagactgacagttcctccctccctgtatcctgcaggaggggccctgtcccaacaagagccccagggcctggcctgagggtgtggatgtggggagaggagggtctgtgggcccaggagggggcatttgtaggggacattgagtactgcagctcagaagacatgaatgacagggtgggaggtgtcttccatgtctgtccatggcacagcacccctgtgattcccaagggctgccaggggcccattcatctgagctctttatagatcctacatatgagtccttcatcagatgtgagattgaaaccacttcctccagcctggaacttgccttttcattctccccacagggtctttcaaagtgcacacatcttatattttgatgaaatccaattgatcaattttttcttttatgcatcatactttttgtattcatccaagaaatattttcctaaccataagttacactgatattctcttttcttttcttacatacagcttacagctttaggtcttacattatggtttatgataaattctgaattaatttttatgtatgatgccacgtatggattgaagttctgttcatatgtgcatatgtatatccaataattctaaggaccgtttgttgctaagattgtcctttctccactgaatttactttacaccttcttcaaaatcaattgaagatatatgttagggtctattctggaccctcttctgttctgttgacctatttgtccatcctgttaccaatatcacaccatctggatttctgaacctttataataagccttgaagttgggtattataaactgtctcacttgcttcttcttttttcaaagtttttttttttttttttaactattctaggtctactgcatcgccacacacagaatcactttctcatgaacatacatacatgtgcaccagaaatataaatatatgcacatcaagaccaagtgaaatttatcccagggatactaggcaggtttaacatgaaaaatgagccaatataattcaccacattaacagattaaaaggcaaaaacattatttcagcagattcagaaaaagcattagacaaaatccaataggctcataaaaaatttcagtcaactaggaatagaaacgaagtttctcaaaatgataaaaggcagctaccaaaaaaaaaatcctatggttgatatttagtgggtattacccttaataatgaaagactggatgctttcaccccagatgaggaacaagccaagaatgttggctctcaccacttatttcagcgtcttaagaagataccatcagggcaaaggactccttccttaaatagacacagatttccatgtggagtcattattctcttgctggatgtatgtcttttaccacttctcagtctgcatatctcctggtgatgatttgtttcatcttttttgtgtctccaaaaacctctttattttgccatctctttgggaaatattttgactgtgtaaaaaattttaggctgacaaatttatttcttttaatattttaaagaattttctccactgtcatacaacttgcaactttccaacaagaaatctgcttcattcttatctttgattttctgtacatatatgtcttgttcttctctggctgtttgtaggaggactcagtttcctgggcatagatatgcacgggaaagatgcagtaactacatcaagtgtggtgttgtccaagggtggataaataggccaacagaacagagcagaaggcccagagacagacccacataagtctaaacatgattgataaccaaaaatcagaacaatagtgaaggactatatttgttataaatgtgctgggaccattggataacaatcagctaagtgggccaagcagccttttggcttaggctgaagcaggataataatgttacctattaatagagtgtgaaaactggcttcatgttttcacagtgattagagcaatattgagatacagtaaatcatcagtgaacatatttgctctagttgctattgctactattcatcttcctgtcccgtgcagcgtcttatggttaccatgattcaagtgcctcctggtgaggccgaaactccacaagacactctggtcagtcctggggtacagtttcttccaggtggcagaggctcagtcctggtcacccgctgatcccttctcaggatgtgccacacagttctgccctactgcggggtgaatgctgggatgcctctctctttaaaaattccaaacaagggaactggtgtgagagggtgggtgcctccactccctcagcccttatttccaggtggggatcaccccagaggagtaattcttgagatgtggtccccaacacctttttaggggaagggaggccaacataatcttcaggtaatacttgaagtattgaagtgagtctgtgtttctcacactcatgcactcctgagtgaaagtggagttttccagagactgtatgaggtgagatgaagccgccaactggaaaactacaccaatgcagaagcagctgtgaatgtccagcttgctgctgggcctctaagaggtctgcaaaatacaaaaccatcttgctcttctcaataacataactttttaaagaaaacatagttattttttctaaaatttattcatgtttacatggaataggcatacaatttatgttctaaaggagttaataagtaaacatttgtaaagttctgagttataattactaatactgtaaatattgaaagatacaaccctgatccacaaaagttctttgagctgctcaatactatttaagactgagaatctcaggtctattttaagctctgggctctctctctttccccgcactttttccctcccggggagaaggaaagaaactgatgagtgagtttggaagaataacctggagtgagtgctcccttcaccagtgggtggtgagttccccagaaggactgctttcctccaaagagagatgggcaggaagagggaggagggatgggatcctctggagtaggtaccatttaaggggcacttttgaaagtcagttttttagacatccaagcccctttctccagttcaattttaggagcaatagaagtaatgcattgttctccatctgacactgtcctcattccttcattcactttcatcagtagttctcaattccagagggaaggaaggggattacttactaaactgtaatagtccatacctagccttgacatttttgtttttctgagtgagtgagagaattcaggaaactgaggactgtctgtgttgccaggagctcatcagctgcaaggataatagagacgtttccacaaaaaactaaagaaccataagccagatgctcacctccaagggaactgttggcccagggtaaaggcacataaaatgcccaaattgtatcccctgcctgaacatagcagcagcccaactctgtgagatcaacctgcctcttacttccaggcatccaaacttcacgggctaaagtcctaaccctgaatgtgacaatattttgagatagggcctttaaagagataattaaggttaaggagctcataagactgaggtcctaatcctaaagaattaaaatcctcataagaatagaaagtgtccccagggatgtgggtacacagaaaaaggccatgtcatgacacagggagaaggcggccatctcaagtcaaagagggaggcctcaggggaagcccaccctgctgatacattgatcttgaacttccaagctccaggactctgagaaaataaatatctgctgtttgtagcctaatctatggcattttgttagaacaaaacacgctgactaaagacaggcagcccggatcagcccttctgtgctctagggccagggtttctgccattcacttatcaaaggacaacatcaaattatgtaaatcaaactctgtttcaaattctagtgtgatgtgaaacaaactaataggagatatgaacatgtccctatcaattttgtcatttacactaggcagaaatcaatatgatccaagtaacagcatttaaagaattgctgtaatctaaacatctcagaattgctttagaatgtatcacattgaatatctaaaataagagaatgtacattgcttaccagtatcactggcacatttacaaacctgagcaagttttcggcaacagagaaaacagtgtgaatttcacataacagtcatagtattatacaagtgacattttccaagtgagtaaaaaactgacaaatcaattacaagaacactgggaacaatctccaaagacgtgttcgtcgaattctagttagaatatggttgggaagcctcaagaaggcagagacaatgaaaacatgtggaaacatgcaaggtggaaaggtggactagtgagcgatggataacatcagatgatggggggttaatgtcagacttgcagggcattttgctacttgctgggaatttgctagggtaggaggaaggtgtggcctctgccctactggggcttcaagtgcaaatgaggcaggagtacaataaactgataacaacacacaacacagaatacatagaaaataattatagacaattatcttcacattaaaagaaacaaaccttttagagaagagtcaaaaaggggtggagatttaaatggggtggtctggacaaacatctttaaggagtgaagggtgaaaaagagtaaaatgtacagatagtgttgagggagtgctctaagcagggaagggagaaagggaccttgcaaggttgggcgcgagtctggtgcaaacaagggagagagtgaatcctgtgtgaggatgtcatgggacaaggtcaaatggtgcacctgaggacaactcagggggtggacaccatcctgaaatctaagagttacgctggctggggtgcaattgaacaaatgaagcagggtgatgtgctgctgtgatggctatagagcattgacgggatggagctggggctggtcaggggctctcattaaggttctgaccatggtgggtgccgggcaacaccctggtcagggtggggaagaatgcatgacattctgcagggtgggattcctgtgaagaagcacaggcgctagattgtgtgatgagtctgggaaaaacacagagagtagcctgtgcgtggaacctggaatgagcagagtgaaacagcttggagaaaccaggctgtaggccagactgccagcgttagatctctccacagtgagcaacgccagaaacaacttgttatggcactcttactgaatcgctttcctggcttttgtaggaagggatggatggaaacttgaggccataatggtggaggaacatcaggatcatgaatcagtctctgcccaggggtccccaggaaggatggactggggtgacagaggacagaactccgagcaaggtgactgaataaggatgaatgacacttgtcactctcagaaatatggagcttgcagaagccaggaaggttgaactagtttacagtcccaccaacagtgtaaagatgttcctatttctccacatcctctccagcacctgttgtttcctgactttttaatgatcaccattctaactggtgtgagatggtatctcatcgtggttttgatttgcatttctctgatggccagtgactataaactagttcaaccattgtagaagtcagtgtggcgattcctcagggatctagaactagaaataccatttgacccagccatcccattactgggtatataccgaaaggattgtaaatcatgctgctataaagacacatgcacacgtatgtttattatgacactattcacaatagcaaagacttgaaaccaacccaaatgtccaacaatgatagactggattaagaaaatgtggcacatatacgccatggaatactatgcagccataaaaaatgatgagttcatgtcctttgtagggacatggatgaagctggaaaccatcattctcagcaaactagtgcaaggacaaaaaaaccaaacaccgcatgttctcactcataggtgggaattgaacaatgagaacacatggacacaggaaggggaacatcacactctggggcctgttgtggggtggggtgaagggggagggatagcactaggagatatacctaatgttaaatgatgagttaatgggtgcagcacaccaacatggcacatgtatacatatgtaacaaacatgcacgttgtgcacatgtaccctaaaacttaaagtataataaaaaaagaaaaataaaataaaataaaataaaataattagctggaaaaaaaaaaaaaaagaagaagccaggaaggtctgctttgctcctgacctgcctttccagagggtttccatgggaattgagaataatgggctatcaacagaagcaaagtaattttgtcttgaattcagtcagaaatctggttactctgaaaatacacaaaggtaataaataatctcaagaacattcaccctgctccttggaggattcagcatgttttccagacatgatcccttttacagccttgtgcataggcagtccctgcctttgtggaggagctgagccccctagaagagcagtttgtttccagctgtgaggctgaaatctgccctgggatcgggggcctgaaacgcctcattttatccatgcctccatctcactcaacaaagccctctgaaaaacagcctttagggactccctgtgcctcttcctgtagagttactcagccaagaagtagatgactaggtgaggcatgctgaccacaatggacagtagcaacaggaggtcaaaggcaagggtcagaaactttcctggcaggcacacaaggacaactaagggcaggacccaaaggaagaagctgatgatcacaaagcagacaacatgataggtcctgatgggggaacaccactggggacagcacagaccccagatgatcaggatcagcttggacatgcccattacaaagcaaataagtacatgacatgtcataaagcctcatgaaattggtcacatgccaagcacttctcccagtactcacagacctggctaactgcatacaaagaaagggccagggcccacctcaccatggcagaggtgtgctctgggcggtggcagcaccaggtgggacagagggcacagagaaagctctcaatactcatggccaccaggagacagagacccactgtgtcggagaaataggagacaggatccagaaacacagccacctgcaatgccgcctggtgatacagcatgaggattttctccagcaggatcacagttacacaggagaggttgaccatatcaacagtggccaggttaaggatgtaggtcacataggggctgctccagacctgtgagtagagaagccagcagatcacatcattgcctaccagtccacagagggccaccagcactgtcagggagaagaccacctgcctgtccaccaaccactcacctcccgtatggctcatgttcacatgtcctgaggtctcagtctcattgtcccaatccagctttccagagagggttgcgagaagctaggctatggtgggctacctttgctgcctgcgcacatcctgcaaaaacaaaggctggtaacataccaggtctggagaggagagtcagggttgccctctgtcctcagaggttcctgctgagcctcatgagattggcagggattctgcagagcagagtggaggaaaggagcaagcttcttgtgggagacccatcccttccctcccagattctccattgcaggatgccctctcatgcatacccttacccctctctccaccgcattcagttatccctgatgcttcatgctgtgcccaaggcccagtgtgtatcccgtgcacccagattatctataaggctgcataaaaaaatacatttgtttacattagcccataaggatggttctccaactttcccactggtacaggctgtttttgtgacatcgttttggtgggggcactgagtgactactttaccttgaggttctgagactccttgagtcctggatggggaggttgctggtcagtactcaagggaagggctcccaaccttgctcctgctcacctcttctctgttagctctcaggcctcctccctggacctttgcacatgctgttctcctgcttggaagagcctctgtgcctcagtgagctcggtctcctccttccagtctctgcctcagggtcaccttccaggtgatcttctgctgatcagcctttaaacattgcactcttgacctgctggcagtctatgatattcacttacttgcttttgtgggaatcatgccctggaatggaagttccatgagaatttactttgtctttaaaattctgttcactgccttttctccagcccctggaacagggtttgacactgaggagctacttggggagggtgcctgcagaggacttaagttgctctgttacatgtaggtgagagcaggggaccctgcacaccagaagctgcttcatggggtcccgagggagacatgcacttgagccatgggctctgtccacttcaggagcaggcactccgcttcaggctgccaatcacaggtctttgtgtgaagaattgtgcagggagggcaaaggtaccactttgccttagaatttcctagtttgtattcctgaaaattccttgtcctgaatatcccgatagccctgggaaaaccaagctggttggtcacctaactaaaaatgaaacgggagaggatcaatacctcttctgggaacccacagctgagtcaaacctagtaacctgggagttcaggccaagggtatgaaagctgatcttatgtgggcaaatcacagctatctttgataagcagtggatccttttctgcctcagtattcccagctatctaagggttgctgttattagctgaattgtgaccttctaaattcatatgttaaggtcctaacccctaatacttcagaatgtgactgtgtctgcagacagaatctttgaagaggtaattatgttaaaatgggtctttaggttgggccctaatccaataggactggtgtcctcatgagatgaggagattaggattagttaaacacacagggacaaccatgtaagcatgcagggaaaagacagccatctacaagccaaggagagaggtctcagaaagaaccgacagtgccgaccccttaatctcagaattccaacccccaggactgtgacagaatagacttctatcatttaagtcactcagtctgtggtcttagtcatgggagtccaagctgatgatcacagtagtgaagagaactttatacatggaatcatgggaagtctcagaatggtgagacgaacctggtcctacaaccctgagctactgaagctttgtttatggatcacagaggcttctaaaacaaagattgttccacaaattgatgaaagcctaagatatgccaggaaatatctcacacgtgaccctgtgatctgcagtcacatattggtgcatcagtggggtttcaggagagtgctagggaccagctccaagtgagcccagtgtttgaatcttccctccttgccaggatgatggagttccccttcagtcagcagctctgttgaaatggaagggtctggccccagtctcgcccctccctgtgcctgttgcctagactttcttatctgaggccaggagaggaaagcagatccagcttatatctaatctggtcataagacgaggcttggggcttagtaacattggtgtccatggaaacatcaggctgatgtgcggttctgtgcccaggccagggtgtcagaactcgtgatggtgacagaagagaaactgcaaacaggactccatggcccaccccaggccaccagggcaccaagcaggagcagctgggctttggtctccaacaaggagaggagatttatagataaaatagtttcatgggaagaagtgacttcccctccagccagaagaaaagatccgctatggaggtggcatgtggcctcaggggcagagtcatgcttcccattcctgagctcattgaaacccagctcatgcccagagacgaccactgagcccagtgactgagcagtacattcttcattgtcacctaggaggaggaggcagccctcctggggtggagaggcctcggcatctggtgtggccccagcactgggcatagagacatcctggtacttggaaatgtcatttgtggtcttgggaatgtcatttccaagttgggtcatgagccaggctccccaaggagtagatacaacaggctggatcctgggattcagggagccagcgctgttggaagtgctcagtttggtgcagccaaaatagccaagtagcctttgcattgggattgaagtatttgctctgattctgaggcgagagcccaccctccccacttaatttttatctgaggtgaaattcacataacataaattaaccaatttagagtgcacagttctgcctcactttgcctcttcacaatattgcgcaacccccaactctatctagttccaaaacattttcatgccccataaggatgcccttagcagttacatccctttctccctcccagctcttggcaaccaccatctgctttctgtctctgcgcattcacccattctggacacgtcctattagtggaatcaaaccttccgtgacattttgtttctgtttctttcactcagcctcatgttttcatggcttgttcatggtgcagcatgtgccagaacttcattttctgtgttagatgagaattaaatacgaatatagaagctgggaaattggaaaatctgaaaggttacacccagaagtcatagaccacacctcagtaacacagtggctcaaatcctacttctaacagaaaaacacaccctctgcccatctacacagccagggcacctgtgaaccagggaccagaacacagaagtagctcacccactggggctaccttgggaaccgcaggccctcctttttccaggaaactggtttctatcctgtcaatcttcaaatgcaccttcctcagtaaaaaaaaaatcacaaggttttaaatttttttaaaaaatgagtctttgagttaaaatgctttgaaaatgaaaaaaaaggtagagaccttttttctcatacctgggaggacttggacggacttggtatcacagaggccaacctcctgagagatcaaagttctgccctcatgtcaggaagctctctaagcatatctgctttgaactgggtcttgacaagcagttatcaagttccctgtgtcccttaggtcttcctgtaccagggccacttgcatatcagagcccaggcctttaactgaagcatctttatctcaacatctcacgatatcccccaatcctgtctgactctattactctgtccttaagaactgtcccctgaaacaaagaagaatctttaagagaagtcagtctctccactttaatgcatctcccagactgaggtccagcccagcccaacccatcctagaaggcagaagaggaaagtcaggtcagcattttcccaatgaactcaggaattccagtagctcaaacgtgctccttggattttgtcatgaattgaattgcatgttttgtaaagtaaaattaatgtaagaactttactttgctgtcttctcaaagatcaatttgctctttcttgattttctctagtgcatgtttgtttttgttggaaaattagtcatgaatgatccataaacataatgtaaagaagtcttgggaatgtttttgtgctgtgccacttaccaagcaggttctgacacaacatattggcaaattcttactgaaagccagatcaagctcacactccatgtatcctcatgctattcccctccgttcacctacagctgtttgtgaaggagccagctgatcatttcatatagacttttgttcacatgtggctcaacttgagaaaaatgagatggatgcaaggctcctttcgttggtttctctagcaattcatgcatttctagcttgaagttgcttcttatccctgcaggaaataatcttttattatattccctcttaaaaccttgtggttaaatgtgattcacatagtggggcagatggtttctgtatggttctacagtgaccaggaaggagagatatataagaatgaaatacactatgatcaaagggtgacaagatgttaaaatacacccctccttgtccttcggtgctgactggctgtttacctcactgcagagatagaatctgagaagacctcaaggtcacatagggaatgtgactttatgggacagtactgatcctccctacaagggagccattaagggtctagagcagctgttacctttggtcctatctcctctatatttcatgtagtttttatattcaagagattgtggatcttgaatttttttattatatgtacccaaattattttttcattattattattttttaaattatactttaagttctgggatacatgtgcagaacttgcaggtttgttacataggtatacatgtaccatggtggtttgctgcacccatcaacccatcgtctacattaggtatttctcctaatgctatccctcccctagacccccacccccaacaggccccagtgtgtgatattccctgccctgtgtccatgtgttctcatttttcaattcccacctatgagtgagaacatgccgtgtttggttttctgtccttgcgatagtttgctgagaatgatggtttccagcttcatccatgtccctgcaaaggacatgaactcgtcctttttatggctgcatagtatttcatggtgtatatgtgccacattttcttaatccagtctatcattgatggacatttgggttggttccaagtctttgctattgtgaatagtgccgcaataaacatacgtgtgcatgtgtcttcatagtagcatgatttataatccttcgggtatatacccagtaatgggatcactgggtcaaatggtatttctagttctagatccttaaggaatcaccacagtcttccacaatggttgaactaatttacactcccaccaacagtgtaaaagccttcctgtttctccacatcctcttcagcatctgttgtttcctgactttttaatgactaccattttaactggcatgagatggtatctcattgtggttttgatttgcatttctctaatgaccagtgatgataagcccttttcatatgtttgtttgccacataaatgtcttcttttaagaagtgtctgttcatatccttcacccactttttgatggggttgtttgtttttttcttgtaaatttgtttaagttctttgtagattctggatattagcccattgttagatggataaattgcaaaaattttctcccattctgtaggttgcctgttcactctgatgatagtttcttttgctgtgcagaagctctttagtttaatttaattaatttgtcaattttgtcaaattttgtcaattttaattagtgtaatttgtcaactgaactaaaatttgtcaattttaattagtttaatttgtcaattttggcttttgtttccattgctttttgtgttttagtgatgaaatctttgcccatgcctatgttctgaatgatattgcctagttctagggtttttatggttttaggtcttatgtttaaatctttaatccatcttgagttaatttttgtataagctgtataaaaggggtccagtttctgttttctgcatatggctaaccattttcgccaacactatttattaaatagggaatcctttccccattgcttttttctgtcaggtttttcaaagatcagatgcttgtagatgtgtggtgctatttctgaggtctctgttctgtttcattggtctatatatctgttttggtaccagtaccatgctgttttggttactgtagccttgtagtatattttgaagtcaggtatcgtgatgcctccagctttgttccttttgcttagaattgtcttggctacacaggctctttcttggctccatatgaaatttaaagtagtttttgctaattctgtgaagagagtcaatggtagcttgatggggatagcattaaatctatcaattactttgggcagtatggcttttttcacgatattgattcttcctatccacaagcatggaatgttttcccatttgtttgtgtcctcttttgtttccttgagaagcagtttgttgttctccttgaagaggtccttcacatcccttgtatgtttttttttaagaaacagaatctcactttgttgcccagactggcatggagtgaaatgatctcgactcactgtctcaaattcttggtttcaagagcatcctctgttcccactctctcatgatacctaatactggtgattatcaggctcaagtcctgcctatagtcatgtatctgaaacacaattgggattctatccagggactcttgtccacaggacacccctaataagattggcctcccccatatagtgtatctcttatgcttttctacctttgagaaccagcactatttgcttctatcacagtaaaagccacactcagataattttataaacataaatctaggccctggtttaacaacaatgggcatcaatgtatgaggcaagcttatctagtactaggattccagtttgctgtgtagcattcccatagaaggctgtctttgccttttcattcaaggataagaaaatatttccagttagaaatgtttttggctgccaaatagagaagctcaattaaactaattttagcagtcagtgatgtataatattgaagcacaagacacctgtagatagggctgctgcaagatgttcaagtcagtggcacaatgtcttgaaaaaattagaattatccacttttacttctggcatcttcagaatattgtcctcattcctcactgggcatgttttccgaatgcttaggatatgacttcatactcagaatatgatataaaaaatgcgagaaaaaagaacttcctttccttccatctctttttatatctgtgaaaactcttcttagagtcataccacatagaatgtcctgcgatatctcattggaatgccctcaccataaccaacacttaggcctttttcacctacccccaaattatatacacctccctcccttgtccaagttaaaattaaaatatttgcatctatttgaaatgcattcattattttgtcaagaactgtatgtacctagtatcatcttgttactgcctctagctccattctggcacccacgtgacaggcatttaattccattcattcagtgagtgtcctttccagctagacattcttgggtaaaagaacagacagaatcacacttgttgtcaggaaagtaagttccatcactctcaagctcacagttctctgttcttctcattggaaggattcacctaatctatttagtgaattgtccatagacactggaacttccctctgggagattttccttatttggtttattccgtggccacacctgggtgtttgaggtgaaacacctttctaatgtttgttcatatttcacaatcccatttcttttggcaaaaggtcagggttcaggtttggacctttgggtctgaacatatgatgttattggccatgttattttcacttattagtttgattttatttgttttattttttccttttattttaagaggtggggagtagtaatttcattaaaaacttttgtcttacaaattccctggaaacaatctcatgaaaatatttatcaatgtaatttgtgtgtgtgtgtgtgcgtgtgagaagattcctgttcctagctatgggcaccagttcctgctaagtcctacttcatggctttgccttggagaagtacataacagctacaggtgtgaaagtgcccagtcacccaatccctcccagatgcatctctgcagtagggacagtgggattttctgccgtgggagcaggtaaaaccagtattgttgcaataaacaccctgtcacggatatcacttggtaacactattttgtctctgtaaaatggagcaataaaactttaaacgttgattataagtgtatgtgtgtttataattttaaggtacagtactcaatttttccccaacaaaagcaataacttaaactcaccactttggttgcagaagacattaaatcctccatattcttctgtgtgtccagccattaaagcttattaataacaggggtagaaaatcatatctcattatgcagtgctcctgatgactaacaaagttgaataatttaaccgtttaacaaaaaagattaaagtgggcttatacttcacactatcctccagtaaaaaaaaatcaaattgatcaaatatttacatgtttacaaatgaaataatttaatagtataagacagcatagattcattttatattatctcatgtaggtaagacttctttaatcataactcaatacataagccataaaagactgacaaattcaaatttataaaaacggtgtgcttgacaataacatgtttttaaaatcataaccgaagtaagtgaccaatgaaaatgttggaaattgtatctgcagctcagacaactgaaaaaggactaatctgcttatagatggagagctaacagaagtggagagacaaagacctgtccacgagaagtctcatgccccttccttcactctgacacctccttaacatgctcctgaaatgtcagcatcatgagacatgagctacacaatgatgcagtatgggaattaagaggtaaccatatattttaatatcagacttgaatgaatcttctttgttttgagtaacatgtacacataattgaataagcacatatagaaatcattaaaaaaagttatttgacaaattacaccttaaaaggagactatacattattttaaacaccatggtggacaaaactgaccatgtcttcagccacagagtaaatctgaaagaaatacaaataataatattaataataacattttgttggttatattatttgaccacaataaaataatatatacaataaccagaatttaaagcatatatatatataaagcaatattatagaatggcaattctagtccttgaaggattgtctaaaatcacagatataaaattaataaggcttaaataaagggtatgtacttaaagggaatgcaatttttattcaaattacaaagaggtattattaaaacaacttattatgtacaaagcactgggacattaaactgaatcatgaagtaatgacttcaacctcacaaaacttctcgtcttctaggggaagcttaaaataagaccaaaatggtggaaccattacaaattacaataatgttgtaagaaataaaagatcaataagaccagccagagaatgtgatcatagaaatgctcttaaagttgacctttttaactagagataaaacatggaaaaggcaaaaacaaggaaaattgtgagtgacataattcctcacagaggaaagaaaatttgcaaaaaggatgtgttccatttaacaaaagaaacccaatatgagagttttgtaagcaatgtaagcaagatgaagaattaaatggtattaagttggagagaggatgaggtaaatttgctttcttcaaagtaaaaggtttgggtgtaaattctaacctagtgaggagggattatattatccaacgtaatgtttttgtacatttattcaacacactgcaacatattcatcatccttactaaataattgttacacatgttgtaaataaaatccaaggagtcctgtatattcataaggttaattaatcctcacaccaaccatgcatattaaataccaactttatcctcctcttgcataagatgaaacagagttacagagagttatttgcccacaataacatgctttgaatgggagagccaaagtttggacaaaggcaatctgggtccaaaaccctgactcttactcttatgtgatgatgcctcttggtaattccgacaagctcaagctctatctaaggaggagatagacaaagggaggaaaatctgtggctggatttggaggatgttccaggataatgattgagaataatgcatggccttttgtatggtctttatttgggattccacaggtaccaggaaagtctcactgggtcccattcccctcatcgttggaactggagcacattcaaactgggcttactgcctaggaaggaagttaatgtctcttccaaccacaaacagcaaggggttgttttgaaagtccatgaaagctgaacttgattagaataaagcattgatttgatgcagcagccttatgatgcagaacaggctgggttactatgtgtacaattccccagctcagatgtgggaaattatgtttccacatcgaccctgtgctccctgggaagaaggttctccacatgctgagtagagtgtggttgctccattgggtcgatgccagctgcctttttgttcctccccacctctggcttatctgctaacgcccgttggagaatcactctgagagattccttcagccttttctttctgaggctccccacaaagaaataaatgatagggttggcgctgctgtttataatgaggaacaaggaaattaaataggaggtggtgacaaacattttgaaatctgttatgaggggtgccacgctcaggggtagggcccagagtaggaacatgggggccgagatctgcaccaccgcatagaccctggtggccttttgctgctgggagcagcacaggaatctaatgagtagagtcagactcgacacacacatcacaagtgaaaggatagcatggaagagcccagaaagctttagaaatatgacacatgcctttacatgtttccagtaagttaggaaaagtgattttactatgttgatgcaaaaaggcaggccccagatgagggtgcagacaacattagatgtgtattttgggcggtggcatctgtaccagatggggaagaggacacacacacaccgctctgtgctgatggccaccaggagacagagacacacctcaaaggagaagggagacaatatggccaggaaatcagggataaaaaacacgactccatgataagttagcagagtcacctgtaagaaccccactgccgagcagcaaagatagatcacgtcagcagcgaccaggtggaggatgtataccatgtagggattcgtggccccacagcaaagcagccagaagacagtgccattcaataagaccccacagagggagaccagcacagccttgggggcaatgatattcaagggcagggcctgctgtcccactgccatgctcatctgcatatgtatggtttcattcgtctcattttgaagaaagacgccacagagctgagataccaggtttgggttctgtgcctcctggtcaccactgtggagacaaaggctacatgagagagatatctgtgactcagcaaacactgtccatccagccctctggctgaaccagcaaattttcccccagaccatggggtgctgggacctgagtgggccacaacatcacagtcaggagcagtggtccatctagtggtgtcctctggcctcagaccccttgcctctacattttcctaggctggaatagaacacccattgttgggtgtgctttttaggaacagctgaacattaactacatatcagagtggatgggagtatctgctctgcaaatagctctccatgaatttgtgatctgttctccctcccctaacacatctcctgttgtacaggatgccccaggcctacccacatagacccaatatcttgttgttgggcactaatgaggcactaaacattgggaatggagatttgtgtctggtccaggttctactcatgagacactagtgtctcatctcttttttttttttttttttgagttggagtctcactctgtcacccaggctggagtgcagtggcgcgatctcagctcactggaacctccaccttccaggttcaagcgattctcctgcctcggcctcctgactagctggaactacaggcacccaccaccatgcccggctaatttttttgtatttttagtagagatggggtttcaccatattggccaggctggtctcaaactcctgaccttgtgatccacctgccttgacctcccaaagtgctgggattacaagcgtgagccacggcacctggccatgtctcatctctttcaaacccagtcctgggcatccttgggtagccatacaggatgcagcagtgccacagtatggcatttccctgggctcagacaggtacaagggagcactgagatttccaaggcaggcatttcacagcagttggcaccaaagaagtcctttctatggctggcaggacttgacctggaaaataaggaaatctgcgtttctccaggggcgtgagtctcaggcagtgtctgtgtgggcatcatcgactgctatgctccaaatgtcagctgaggagaaggaaatgaacagacttagggtgcaacaaatacaaaagaggcctaagaatattaatataaatattaatatagagaatagtattttaatgctatgtaaatatattaatatagagagactagcatattaatactatgtaaatatttatatattaataaattatattaatataacattgctatattaacatgttattaatattgatgttaatatattcacattatatatttatgttaatatattaattatattaatataacatattctcaattatgctatcaaggatattgataattaatattgacattagtttattaatatttatgtatttatttattgctgttgtcccaggtttattgaaaataaaatccagtgactgctgtatattacagcattggagaaagagtcaaacagctccacgaggcattttgaaattcatcccaactgtaggccgagtgacctgcaggttggacaggctgccaaagtccaaaagcttcagcatttccttagtgtcaggatctacttcgatgatctcctgatccagggctgagaccttggggacataattgtccctcctttctttctcctcctcctgtagcttgatggagatacctctcactggacctctctgaatctggttcgtcagatgcgtgacgcagcctgctctcctgttgtggagcttcttgctgaggataatggggatctcctcacacacacttgtttgtgtggaagtcattgcccaggcacatgtagtacttttctacgatgacctaggccaccttcgtcacagtcttgatgccaacacgacccatgttggtgggtctttggtcattaatattaattgatattaacattattcagtttattaataatgtatcattaataatatttatacaatattagtaaaatagtttatcagtacattttaatgttgatatgctttcaatattaagatattaatgtattattgattacatgtgaatatattagcatattaacagtatatattaatatatttggtatactatattaatattatttatatgatatgaatatgctattagtggcatattaataacaatatattaataatataatgtgattaatagttgtatgtgattattaattatttatgattatattatgattaacaagtagtactattatatcttgtttctaatgaataattattattaatattcaaaaaactaataataattgttatttttatagaatctggaattgtggagcagacttcgcaaggcttctctgacctctgcctcccgctctgggatctgtgaaacacactgggctcttcttctagacctccctttttgaagctcctccaaagaccgtttcatcatctctactcaacagtctcctcaggaaattgcctcttcagtaggcaaatgtcacttgccacaaacttatctttggcatgaggataagacagtgctaaggtagaactgtctgtaccttctttgggtttacattgtgataactgcaaggagaaaaataaattgggctgagtggatagaaaatgataagggtaatggatgtttcctagtgggataaatgaggggagtttcttagtaggacgtggagatctgaatgacctactggagcaaccaggtgacagccagaaggaaagagccacaggcaggctcagcaagttcaccaccctggggcaagtggcttcatctgctttgttaatctttgatgctcctgtccagagagggcctcttaagcaacttgagtgcaataactatttttctattattgcgttaataaaccccaagaaggtccctgcaactctagagagttaaagacttataagccattttcaagattggagaatattcttatctcagccatcagtggacagaaaggggcagccaggccccttcagagcagcactgagctactgtccctggagtggtggggcctgaccacagcttcctctttcaaccatggaatccttatcactattttgcaaacaccaaagatgtagcctcagatgtgaatctactcacatgctggaagtttgtccatgatgttgagagctcgtttaagtggaagatcctggatgagtgcagatacagactgtgagcaggagagctctgctctgtctcttttcaagactctgagacagaggccaagagcctagcatgcaaaacacctcagacaatgcatccagggtaggggagaactgatatgaaccattcacccttagccaaaaacctgctcaccttgggcaggtgtggtacctcaaggctgaccacagactagaggagatctcatgtgtcttccttagagagattcctgtccaccttcctgtctcaggaagatggatggaatcatttcattggaggatgccaacatcccctgtccagggcccactgcctgagccttggacatttcggctgagctggctaggcctctgagaatcagccctgatgacccttgatgccccactatggagtccagaacactgaagaacttaggatgcttgagaggtgaaacgctctgggcccaaagagatcagaccatcctttcctgagatcctgaacactgataatgacttctcatactttaagacagcttcacagatgaagttgccagagaagctgagctcactaaagcaggatgtatctgtaacaagaaaaaaatccttaaatgagttgctatagctgatccatgggaatgcccaaaaagatgttacagatttcactagggcttaatcttagtcctgcagcaccaagtacacactcttcctcctactaacctgggaagagccagttcaggggagaacgggagggaataacccaaatgtccattaacagagagtgccaacagcttccaaaatgtgtctccagtcaaggacaggccaagatgactcatcaaagaaatgcaaatcaaaaccacaactagatagcaccttacgcctgttaggatggccattctggaaaaacaaaagataacaagtgctaatgaggatgtggagaaagggatccctcacacactgttggtgaaaatgcaaaatggcgcagctgctgtgaaaagcagtatggaaattcctcaaaaaattaacagtagaactgcaccgtatggtccagaaatcccacttctgagtatttgtccaaaagaattgaaatcaggttttcaaagaaatattagcactcttatgtttgctgcaatactattcacaatagccaaaatgtggaaacaacctaaaaatccatcaaaaaatgaatggataaagaaaatgtgatataaacataagatagaatagtattcagcctttaaaaaggaagaaatttggccaggtgtggtggctcacgcctataatcccagcactttgggaggccaaggtgaatggatcacgaggtcaggagttcaagagcaacttgaccaacatggtgaaaccccgtctctactaaaaatacaaaaattagctgggcatggtggcaggtgcctgtaatcccagctacttgggaggctgaagcagagaattgcatgaacctgggaagcggaggttgtagtgagccgagattacaccactgcactccagcctgggcaggggagggagactccatctcaaaaaaaaaatggaagaaattctgtcatatatgacaacatagttgaacctgcagatcattatggtaagtgagattagccagtcatagaagaataaatcctgcatgcacttaaatagggtatctaaaatagtcaaattcatagaaacaaagagtgggatggttgttccctgggctgtaggacaggaagtagggagctagtagtcagtgggcataaagtttcagtttaacaaaatagataagcactagagctctactgcacaaaagtagtagttgcctatagttaacaacagtgtactggaatgtttttgcaactgaagctgcttcatctttttgagcctctggtatttcctctgcaaaattagaatactgataatacctacttgtgggtttgaaaattaaatgggtggatagcatgtaagtgcatggaacagtgatgagcatatagtgagagatgaatgaataaatactgtcctgttgggacagatgaatgtcaataagcaaatgcagtaaattggatcatttcagacggtgcttactactctgaaggaaaaaaaaaagtggcagtgggatggactatcttaaggaaaacgggaaagacagtgagccacttaggttggtcctttctgagctgacaatattttctggctttttcaggaagccaatcctgggaatatctagaggaatagtgctgcaggtagtgggaacaggaagtacaaaggcgcataggaagaacagtcgtatggttgaagaaaagaaagaaggccagtgtggctgaagtttagggagggaaagagagagtgagagaaataagcttttagagaggtaggcaggtgtggaatcatataggccaagataagaagtttgaattttaagtgcaatgtccaggtgttggaaagttttaagctcagataataatattatctggatttatttatttctttagagacaaggtctcactctctcacccccaggctggagtgcagtgatgcaatcactgctgactgcagcttccacctctccagcccaatcgatgcctccacctcagcctcctgagtggctgggaccacaggcgtgtgctgccacatctggctaggtttcttttttaattttctaatttttttctttttgtagagatgggagtctccctttgttgccctgtgctggtctcaaattcctgagctcaagagatcccctccaccccgaccccacaaattgctgggattacagggatgagttgccatgcccagccaaggatttgcattttaaagatcactactgtgcacttaaaattattaggataatagatctcgtgtcaagaattcttaccaaaatgaagcaaaattcgcacacaaaaaaagaataagcaaggatggattccagtccccagtcctcaaatgaagggttgcactgtcctgataatgttctttcccttggggaaaacacatctaaaatccttgcaaaaactcctccgaattagagagatgagaaacagagtcagatgaagagagaacacagttctcatcttacctgtgacatttttcctgggggcaggggtaagtcagggggcagtgaggctgacacagacacagaaggacaggtgacacctctgtggaccaatggtctggaattgtcttcctgtcctctgaatatgagctctctcttgggcttccagaagttactggaccttgagcaactttgatcaagattcccatgtgctccttgtttttcttctggccaatgagtggcttctatctgtggggacagatagctgagcatcccgaggtttatcacatggtcagctgctccactgtggctttatgtgcccaggcaggtccttcctgtctccatagggctcctttctcttactctggtcagagctccgcatagccctggcagcccctgactccctcatcctagggacagggaatagggccttgcaaggagtagacccagttccaagttggatatgttgagtcagtttctagtgagctgaacttcatggcattgctcttgataaacacaagatcaagatcaaattcagagaacccctcaggcaaaagctttcaccatgcttcactcccaaagaaagcaccccttgaggggtgttccaatacaatttgtgcagagagaagccagtaatgtggccctttcttcacctcagtaagaaaagcttggccctagccctcacagtttgaaaagagtgtcctcctattacaggcatgggtatgtattgggacttctgtgtccacatttcacctgcattctcaactctcagggaccacagcaggtctgagagattctgcctgtctttctgacacacatcgggtcaaccctgtgcactgactgatgtcttaggactcagattcggggttgccatgagctcactgtcattttaccttctcagtacttttcccttgctctgatctcacctgccacattcactttaagaatgcacatttctagattattgattttccaactgagttgtcccgagggctgatgttctgtaaacagttatttcattttctctgttcaaagatggtttgtacccaccatcttcatgtaacagtttcttggtcacttaccatgtgaatatgcagtctctgggcatggagtcccctggactctcaatatcttgtgtcctgttttgccacctgatcctagttaggacaggcactgaaaatcaacaccaatgacgtattgttaccctgagagaaaatgtcttgcttaagtgtagaataacattttctgttgtctcttgtcacccctcctagccttttccccacaatcccacagtcatgtagatgcatgctgaagggtgttatgccccactctgttcctcccacactgaccggcttttctcacccatcagctctgaagtacaagaggctcctggacttcaaggtgctctgcaagctcctcacctgtatctgcctcccagtttccacagtgccctttcatggcctttctcctggacatacgaagtgtgcttctcagaggagttttacttagtggaattatctgtctcttaaagtgtaatctgtatcttttgaatgaaaaaaaaaagacctacatttgttctctctggtatgcagacaccagactcttttgtgacccctgaaatcagtttctctgtttctgatgaactctggaggttttgtcactgctgctgcactgctttacttgattccaggaattcgtcctttgtcctctgtggaagttttagttcaggtctcatttttttcccttaagcacaagacccctcccttaatgtaacaccacacgttctccagcgcaggccatctgttctattgaagcgattccaacagcttctgcaattaacttgtcaagagaaggaagaaaagaaagaaatgaaatggtcaggtatcccttgaagattctgatggtcacacagagggaaagagccttgtgtgtgggaccttgagtgtcaggccacctcttctccaagatgggcagggtttggtccatcttcccaaatggagctaaagatccatgctggaaatttccctgctctagaacagacagcttggagtgatgagtcatgatgaagacctttctattgattcttcattgctggggtttccaacctacagggatgaggactgatgcatctgtgaatgagcatgccattccctggcagacacctgagttcattgcttgctaagaacttggttctacatcacttcttctgaaatagaagggcctgctggcttgtcagcaaataagcaaagtttggcttgctgtttggagaagcctaattttatcagtgtcagctcaacatttaaatttgaaaaaggaaattcagcataagcaaggttcacattcaggtgtatgcttaaattctaggtattcatctcattcatgaactcaatcagtagccagagtttccaggatgcctagggattgcccccaaggatcagtgctggtttgcagctacaataccagagtttgactctgatgccacactctgagggcagtcctcacctattgtgataaaacccttcaggtcctgtggcgtagccatggcccatcctggacatgtttaacttcacccaccaggcacccatctcactaagaagactttgatgttcatgagaaatgaatttctgctgcctacaggaaggagataggacttctctgaaccgttgaggctcctgctacctccagagcaggcaacaaagattagaccctgccaggagggaagcacaccagataaggatggagaattatcttgacaaggggcatgaaaaaaattactggatgacaaaaaaaatacatcaccaaagatcaataaaacatttgtagaacaccccacggagatgtgatctgcccactgtacagatcagaagagcttcctttcttcttctgcgtcagaaaatatctgcttgctggtcaatgtccagaggatgatgtgaagatgggaaaggacattttccctggacaccatttctgaagttacatctctgtgtgtgctttcattggtgatgccatttctctttgctttctcttcttttcttgggaagacttctctgtctacatttgtatatttatttggctgactttccctgaatttgctgcctgactgagtaatttatttcaaaataactacatggcaagctgttttatgctgtttaactaaatccattgattgaagcattttctgacacctggccgtccacatggagatttctcttttccagtcttcctagtctggaaaagacgtcaccatccacaggaagtgtttgtcattgtacccaatctggtctcagtagcaccatttacataccaatagtgtaaatctctgtgtttcttatagacacatgatatggtttggatttgtgtccccgcccaaatctcatatcgaattggagaagcctggtgggaggtaactggatcatggaggcagatttcctccttgctgttctcatgacagtgagtgagttctcatgagatctgatggttgaaaattgtgtgaccttcccccttcactctctctctttctcctgccaccatgtgaagaaggtgcttgcttccccttggtgttctgccataaatgtaagtttcctgaggcctcccagttattcttcctgttaaacctgtggaactataagtcagttaaacctcttttcttcataaattagccagtttcaggtagttctttatagcagtgtggtaatggacataatggactaacactatcttgttctctggtatctttattaaagcattttcagtgtctgctcatgctctcttctttaacaataatgtgctttctgtgtttattcctgtgacatgcagcagccagcactgccagcccccatggctctgcatgtccccactgaggtcctgttccagtgtctgcaagtccctcctgatattaacatataaccactggcaattatctcaacatttctattttctaaataattttcattttaaaatcctccagtaccaaaagttgtttaagacaaaaacaaatagttaatttccagttagcaaagctttctctttgtattaagtatgctttaatcacatattcaaaaacatgtggtttctattttaataacttctaaaaaataatttggattttgttttgggtggattatattgtatgaaatcccttgtcttttcatattttgaccattgtattttaatgttttgtagcatgtcttagaatgaatgcaggcattcctttggagcatatatccaacgaaaaggagtgaaattactgggtcagcaacttctttttttttttaatatttgattaaatgaaatgttttacatctctctgttcctcttgctcttctgtacattatcattcttgtggctttttaaattcaacttttaatttttagataattgtagattcacatgtagatgcaagaaataatgcaaacagatcccatacccagttttccagtggtaacatcatgcaaaattatattataatatttttaatgtgggtgtttatcactgtaaacttctctcttagaactattttgctgcatcccataagtttagggatgttgtatttccatttgtgtttgtctcaagatagtttttaaatttgccttttggtttcttctttgacatactgattgttcaacatgatattatttaattttcaaaaatttgtaaattttccaattttcttcctgttactaacttttaatttattaccatggtggtcagaaaacagacttgatatgattttaatcttcttaaatttgttaagatttgttttgtggcttaatatatgatctatcttagagaatgttctgtgtatgcttgagaagaatggtcattctgctgctgttgaatgtaatgtcccataaatgtctcttaggacctcttggtctatcgtgttgttcaaatccaaagtttcctttttgattttgtgtctggacaatctatccgttgttgaaagtggggtataaaagtttcctgctaatgttgtgttgctgtctgtttctcccttcattgtgttcatattttcgttacatatttaggtgctctgaacttgggtgcacatacacttaaaattgttatattttcttgataaattgactccttcgatcattacaaaattatcttctttgaatcttgtggcagtttttaactgaaagtctattttatctgatgtgtgtatagccacccctcttctctactagctaccatctgcatggaacatctttttccatcccttcacttttagcctatgtgtgtccttaaagatatattgaatccctcagatgcaacacatagttggatcttggttttctttttctattcattcagccactctatgtcttttgatggagaattgaattcatttatatttaaagtgattattgacagatgaggacctattactgccatttgttcaggggtttctgactattttgtagatattttgttctttcttcctcttgctgtattcctttgtaatttaatgatttttttgtgtggtaatatgctttgattttactctttttgtcttgtgtgtacctactacaggtttttgtttgttgttgccataagacttacataaaatatcttacagtttttagtctatgtgaagctgctaataacttaacttcaactgcatacaaaaaccctacactttaacttcttctctctacacatttttatgttattcatgtcacaatttacatcttttcatactctgtatccaccaacaaattattatggctataattgttttattttatcttttaattttatactagaattaaaagtgacttatgccatcagagtatgagagaagtctgaattgtactatattcttatttttacagtgagttttatacttttgaaatgagaaaagttcccttgttcccctcgcggggcacgtgatgggggtgtggcttgcttcttcagtgccccactgctcaaacctctaggggagcatacagatgggcagattgtggggctccaaccccacggtggcatctaggggtggatgtttacagctcctgaagccctaggaggagaaacttctcatctgctaaatggggctcccttgcagctctgaggttctgagatcttaatgtgtgcactgtgtcttcagtgcacacaataccacccaacacaaattcaatgcaattgattccccagcagttgaactcaatcacaatgccactggccttgttctaaaaattaaagaactgctgcaggaagggccctataaattttgtcatcataactgcctgagccagagatgtggggtgttccctgccaatcagggcagaacaggttgacatgggccaatgaagcccagaggtcctggaggagatgaaagtcacacaggccccctcagagatatctgccaacgtcagtgttggggtctcttctgaaggacgctgtctgtgagattgggaaaggtacccagcagccttgtttctgtggcccaatactttttccaccagactccttcacgtgcctaatttgggacatggtttctgagctgcaggtgttgcccactccagcccagagatcccagaacatcctgcaagctcagacgcaggataaagggccacaggagcaggagcctcctctctctgggcaacttcagactgtttccccactgtgctgtcctagaaggggctgatgcagtgaacagagcccttggggcaggtggggcctgggctcagctgcagagaccaggggacgggctggaccacattctctttctgccatatgcagctgccttacactacaagagggggaagaagggagctgaggaggtaaaaagagaaaagacccagagccagcgggctttgtcacatcggctgtgacagttaaacctggcattactcgtaattgcttacatttactacacattcatacagaggccatgctgtggctaggcgtctctgggctaagaatgtcttattcatttagaactagtacctcggactctgattacgggccttgctgcgtgtaaggaacagcactgctttagcatgaagcctagcctattgtcagtgctcagagagctctgacaccaacaattggttttcctacgaagaatcacgtaatatttgggttatagaagcagggcagtgctaactggatgtcctgaaaggaatggacctggcataagaagggatggagagcagaatttgaaaagcatccaatcctgaaattgggctggagggagcatgtcccaagcctgttagggactgcaggaaattcatgaccagtatgaaggtgaagctgggcacctgcaggcaggctggtctgctctctctgctgtgaccctcctcagggcaggctgtgctgtcaacaggtgttgtgcaatgccaagaacccatgagaattctcactacgccagggttttgaggcacccctgttcccaggttccttcctagaaccctggtcgccttgggatgactgggggattctagttgactacccaaggaaatctgaagcttgggaagtttgcaatgttaagtctcggtccagagtcggacctggctccgcgcctgtctggcagcagcagcagcaatccctatccgggtccagagccctgcccagtggatactgtgtggtgtttccacaaagttgcatctttgagcacctcacagagaatctggagcctctcaaccaggacaacgtgagaaaaaaatctgaagaaaaaggcccaggtgcttggggtaagaacagccaagcaaagggcagaggctgagtgggtgccaggaggacactttgtcactttggagacagagcctttggcttaaggagttccaggctgctctggaggcgtcgggggaggcctctgggaccacctagtcattttccgcaagaaagtaagagatttcccagttttgtgctcatggggagcattcacctgagatataaaactttggctgcttaactcattttaagggaataataacatatttgcatacactttatttggaggcaaaagaaaaaaaatagtctgttgaataaattattctagattttacttcccagggatttttttttctttctaaaaattatagacaattcatctcctattctcccttcttgagaaattaaccatttgaaaacagatatgtgcccttagtctgccttccaatatctctcatacgatccatgatttttaaagaaatacaactccattgcatgaccaaagggaggagggggaaatggaaagaaggagctgggcaacacaagcaccagggggaagggcctggggcccagggccagcacctccctacttgtgggagcctcagctgttccttcaatccccaggccacacctaaccttgggttgaaaagtgctttctgggctgactccgctgttagaacaggtaggaggttgcttggtaaatgttgcaagaatgtgaactcttgtggtagaaatattctgaggctgattcagaggctgcctgggaccccgtcacagctctggggtctgtctcccacaaggagccatgccccgaacagaggtacctgtgtccactcatcctgcagagagtgggagccagttcctgccccacctgctgtctcctaagtgcttctttgtgcccaggagggagagggagcaaagggcatgggaacctcctgggctgtgaccagtcatcacctgggatcccactgccacagctcagagctaaagacagaaacacccagcatttcactgcacgctgatctcagccagcactgggaagggctgggagcatgtcctgcgtgcttggtttcccatgcccctgagacgcttttcctgcttccgcactatctccttgggttgcacagagagttccagcactccgcttccctggggaaactgacaatgactggcccttgattgactcacccagtgagttggtttcctggggccatggtaacaaactaccacaaaccagatggctttaaaaaaaaaaaacaaaaaaaaaacaaaacaaaacagaaactcatgctctcccaattctggaggccagaggccatagtctgaaatccaggtctgggcagggccaggctttctctcccagctctggtgtatcctggcagtccttggctctccttggttgcagctgcatccctcccacctctgcctccgtttttgtgtgacattctctctgccagcatctgcctgtttctcttgtcttgtacctacaccagtcatactggattaaaggccctccctgctccactctgatctcatcttaactgacatcccaatgacatctacaaataccctatttccaaagaagatcacattcccaggtatcaggggttaggacttgaacatatctttctgaggtcacaccaggtgacccttcttccctaacagaccatccagatcctctgtggctttgcagttatgagcatggggatccttttggcatgtacttcctttccctgtcactttggcccagtggttctcaccttggtgaggtctggatacccattcgtaggagccaagtatgtgagtaggatgggtgttcatggagggtggtctctgggatggagcagggcacagacaactgatatgctacctagcaatgtctctgtggagagcaaagatgcaggaatggaacttgttttgagggcaatcagccaggagtgagagaaggcctggcaggagaaggggttttgccaatgggaacagaattgatcatctggctcaaatatcagttcttccaaaatcctcatagtgccatcctcgagggccctgggagccctgcagcttctctctggggtgacaatagcatgtgtagcctcaacagggacactataagaataaaagagtgtgctattactatttatgccatgatcacaggaatacccaggactgtccctgacacactggacatagggtcaccctacttctccctaagttcaggtgacacaaggagtaggagtgaggtgggcagacagcaagtgagaaatggggtggacagggcacacagtggggtggccaggctggtgcatttgtggccctgtctatggggccagcaggaccagtggggtcagtagagcatatactgagcttgaagaggtggcatggagcacttagaagctctatctgctgcttgtcatctcttggcatgtggaaggccttctgcagagttacgctccagacatagcctcggagtcctgaatatcccccaggctcctggaatcaaggagtgtcttagacggcttgagctgctttaacaaaaataccataagctgggtggcttataaacagcaagcatctattactcacagttctggaggctggaagtccaagatcgtgacaccgacagatttggtgtctggtgaaggctgttgcttgttcatagatagagcgttctcgctgtgtcctcatgtggtggaagggcagaggaatctctctgggttccttttataaaggaagtaatcccattgatgagggcttcacccttacgacctactcacctcccaaagaccccacctccagataccatcgcattggaggttaggtatttagcacatgaaatctgggggcaacagacattcaggccacagcaagaagcttcaggagaaagctttcagtcttgtgaaatgtgaatgaggctttcccacagcctagacctgtcttcacgccccagccgcagcctcttgcattcacggtggcttttgagcatcctctgaccactgagtcacaaacctccctgttccctctctatctggctattttcttggtaggaccagaaaaacttttttttatagtcttgccaccatgccatgtagttttcgtacattgcagctatttcaaattactgcattaccacagaacactttttctgtaataacccagaatcaacagtttttttctagctgttaacctggcctcaaaatcttccctttatttgggccccctttttcttctgtccttaactctgactctggtagagcccatggaactgacagttcaaagcccgcgtggcttttctctccccaccacaacatcttcatctaaatagagtcttgtaacatttacctgccctctctcccttgaaaatcactgttccctggtccctgttggggagcctgggccttaagcccctttgtctttgccctagaagaacttcctctccagctgagtcaggttctcatgagattctaggggtggcttggcctcctatatccacttccctcaacattggcctgtagccacatatggcctggactttggcccagcttccagcatgcccaataatgtcagccctgtggggaagttcctggaggtgtacaaggacgtgacaattcagtggtagggacatcggggtgcttgttcatgtggaaactgactttaccattttcctcttttctgagtagtttatcatttctggattgctgtctgtcattttgggaagaaaatcaaacaagcatctggtgagtataggaacaacagtgcctcacttactaaaaagagactttagcggaacctcatccagttggatctttccaaggttcagacaaaggaactgaaccccaggttgctgacaagtgtcctttggtcagtggccctgtggaagtacacagggcccactgatctgggggacacctttcatgatcctcattttgaagagagtcctgtaccctctccaggctctgggtggctttatgggaaaattctgcctcatcatgacaccctttggtgttcactgaccaccggggttcaggtccttggtgagcacaggggaaagaggacagtgagagcatgggctgttagttgtgcaccacagcctgggtgagaaaagcatcaatcaaaagagatgagccttgctggtgggggccaggaagggtgcagagtgaaaagggggtgttcagtgatgggtgcacatctgattgacaaacttttgcagaatcatttccaggcctttcttaggaggctaagaggcatgggttgggggacagagatgggtatggtggagattctggtgacctgggatttgggggtctccctgtcctgacacagaagctgccaagaaactggcagccaagcctcaaggtggcagtgccaggtttggacactgtcattctctcagacctccctcaaaggatcagatgcccttcttcatccccaccctcagcctcccctgagccctccaggaaagcagcctgtgtggatcccctaaacaagggcaggagcaccagccctacagagcaagcagcagctgggtgaggcagacggcggcacaaggtggggaccacggtgttccagggccacttaggctcctaggaaattcacccgccaccatcctcagggacctcttctttgaaaaaaagggactttctcagaacattctgacaacacgagttgtgaatccctggggctgtatggagaaatggcccacgacctttttccatctcttcccccatcactgcccagctctgagattgagcccctgggaagagggcccggatctttgccagaggctgctgggcatacctgagcacacgtgccatgggctgcttgtgacgggctggaacacctagcccaggtgtcccagaagccaccacagacatcagcctattcctcccctggtgttggtctttgaaaagtgagtctggacaccgcaaaactggaatccaggtttcctactttcgaggggaggtagcaccccatggcgcagctgtgattctcagccctcctctgggccgtgccccagccgggatctgaacatccaccctcggccccaggtgctgttgcccccacactgagccctcgtaccccatgctccctggccctcctgccagggcacccttttcacaaagtggagtggatgaaaagaacaggaaagagcaccaaccctgctgctgtccccatatgacagaggctgctgtgggggcatctgttgtacttgggtgagcaggccccttggcctcgagctctaccatgcaggggtgctgcagacagagccaggtgataggaaagagcatgtctgggaacccacctgatgacagcctcagctcaggatgaggcaggaggcctctggctaggcttaggggagatggctggaggaacctcctcagggtgccagtggactgggtaaagccagcagggggcttggaggtcagggaagctgtgatttatcaagcactgtgggcattgcaatattttctctgttcggttcagtccaatgggacatcagttctatacatatcttcctcttcctctagccctgctcagtcctgggtggagaagctaccagaaccacatctcctgtctgtcccaccataagtctctgcttcattcacgctttcatgtgtcgtgcatcaagcaagcatttgcctgtaggcttggggagctctgagaggggttgagagtgaacaaaattaatcaaatcgtataacagaagaggaagtcccatcctgccgaggatcctggatgtgagaacctgctgctggcctggtgggatcgtggtgccccaggagcatgaactgctcaggagcagaccctgaccagatcccctgcaggcctggaacagcctgatcagcagcctcctaagccccatggctgccacagtgggcctcattgtccttccctatcacctagccggggtgttcccagctgccagacagtgccaactggtggtgcctgcccatcagtgccccaagacagccactacttttcgaagaatgagaccaccagctgctttgtggccagctccagcttactggtgagtatttttaggtagaatcttccagactagtgaagtctttgagattttctgcttcttgttcactgcttccttctgatgtggaccatgcggaaagaggcagaacacaggaacccacacatgggagaatagcaggcatttgactggactgtgccaaaagagttgttcaagtacaatatcaagcaagactgtagttgcaaaaagacataaccaacaacttggtttcaatttgagcaccttaataaacaaactgatttaactgtcatagtctcaagggatgggtttttccaagcaagaactctagggtcagggtagcgaattgctcaagaaaggccaagagctcagggagacataggaacctcataaacagggtggccacaggctggcagtgcccaggttcagccaggcaagagccacaggtcaagggaggctgcaagaggctaaatcctaattccatcacatgcacaaaaatggatgggatggccaaaaatgaccccaaaaaatcaggaaacaaatacggaatgggctttttaattgttgtttgcaatcagaactttatgaaaatgacagaatgtggtttcgcattctctgttgcattagagccagtctgagcatcagtatttgctctaaaatgtgtttagtcaataaagtcaagagaacatgtgtgtggaacactgagaaaagaaggcagaggaagtttgcattcctgcagccatagagggggatattctaggggtggagaggcagcaggcagggggaatgtgtgcacagcctggccgttgtcccatcccctcatcgctggcttcaggccatcctcccatagatggagcagctataatgggagtggagggttgaggggcaggggaggcatctgctgagcggctggatggggtttgtgtagtgggttaggatgagctcctcagaaaccagcctgagctctctggctcaggagcttctcaggaagagctgagaagcggcaacccctgcctgaggggtccttgtgttcatttcccatggccacaataacagaggaccacaaactggtgactgaaaacaacagaagtgaattccttcacagttctgaaagcaaagtccaagatcgaggagtcggcagggccgctctttctctgaaggctctaggaaaaaactctttcttgtctcttccagctttggggaactccaggcattctttggcttctggacacgtctttctaacctctgtctccatcctcatgagggcttcccctctgtttgtctctgtgtcctgttctcttcttataagaacaccagttattgcatttagggtccaccctaaatccaggatgatttcaccttgagatccttaactaattgcacctacacagaccatatttccagataaggtcatattctcaggttctatgtagacatgaatttgaggggggacactaacccactatagtcacagtctgtacaaataaattctagattctgcccacctgtggccttacctgttctacttggaagtcattgttccatggaaggtgacccagggaagcagaattgttctcctcctcaggcagatagctcctggggactggcgtgagaattagcaactgtgccagcacatcactttgattggtcaaggtgccccttgctgcctcccagccaagccaagcaggcccaccccagggagcataggtgggtagcaggtgctggcgctcagtttacaaaggaaggccttctgcctcaccacctctgtggacctgcaaaccgccctaaggggtgagtgggaagtccccatcttacagaagatgaaattgaaacccagacaggcggagactctccctggaggccagatgaatgaagagtcaggaggctcagctcaaccttgggtgtcacctgccacctgtactgctgtccctggagtggcccaggatactaggatatgacactgtctcccagatcatgagcaggttgagtcaggtatgagggaagaggagccagcagatgacactgtctaaacccatctggtcatctcaggaaggcagaagggttggccagtccagcacagacctcgtgcatcctgcatttcagaggatcctgtctgtgatgctcctcttcacggcattggagctcagtgtcgctatcctttcttctgtcctcttgtgaaaaaagacctgttcagatgtcctcagggtgaacctgctgtgccctgggctctggggcctgggtggtggcacagggcatggtcctggggccaatggcaggtggtactaaggtcgacccatgaatcttgaccttagtcgaagtcgacaggttttgttgagtgaggcagcagccggcagaacaggatgagagcaagtgcccagggtggaggaatcacaataggaagctatgggaccaaagagagcacatcacacatctgctcatttagcaaagcaggaaacaggctaaggtgcagaagccctctggtccctggaaccctcaagtttttatatttgtgtatcccttgtcttttgtttcaagatattttttaatttctctggtttgattttttggagataaaaggccttccactcagcgtacaaggcctgttcacttgctttgtcctctccagaatgtgtttcctgacccaaagtgacacagtgatcaccagcatgccccaggcagcatttgctgacaccgtcctggagatgaacaaggagtgcacccttagtgtgggggcagagagagagagagcacattgtctgcaggagtcagctgaatgatctcacagaccccacctgctgggctcttccattttatcacaattattccgcctgttcacgtgcagagagaacacttggggcagattttaagaccttagagagtaacttgtttacaaataaaatatctctttgatgatgtatttggattccatgtcattttgccacatttctcttaatttactggacaccaacaatgatataaaagttaagattttaggaaatgtagaaaatttctaaataaaaatcaaaaaagaaaataaaacaacaaaatgaagagctgcctgggagagatgaacccatggtccccgtcttcacgctaagatgcaaaagagcagagcttccagcttccaactggagctcccacacaaaatactggggaaatcttcctccttccaacaatggtcttcctattgatcctgagaccttgctggcaaccagccgtgtctctgcccctctttctgtgctctcgtgactcatcccagcttctctctctgtgcccctttcttgttcccctctgcccatttctctttttatctgaatccccagatgcccctgcacaatctgagtgtgcagagtggcccagccctccctaggaagggaaagcactggccccttgcttggagagaaggcagagactgctctcccacaagactgtagtgccctaaaaccccctgatcagctcacaccttgtttcctggtggccaggccaatgatgaggttcaccacagcctacctcagccagggaccttatgacttaataggggaagagccacagaatatagccacatatatgggcagaagtcctgagatatccatggggctggatactaaagggtctccatttccaagtagaacctaaggttagatgagagaggtttattatcaatgcaggaggatcctcacaggatacaggatttaacagcctaacagggattccagaagatagttcaaatcagattcaaggtaagctcctgtaagtatggaaaaagtgacaactccccacgaaagacagaggtgagaaggctcagagaagtggatatgctggggtggatacactctgtaaatccagaaaaatctacctgctgcctatttttcaattgttcaatttgcctgttaaatcatctgggcctggtcatgctaaatttttttaactaccaattttgatttacttaatgattgtaaatctggtttatccatttcttctgttttttaattcactctgcattgatatttatactacaactctccaaacactatttcacaaatcaagcttctatagcaaaagtaggaaaacgttttaagaaattttattttaccttgtcaatgaccaaaaacacacaagactggcatcctcacccaatttctctagactttgtttctgggatcatcagctatcacatgttgtattagtccgttctcacgctgctataagacagcctaagactgggtaatttataaaggaaagaggtttaattgactcccaggtctgcagggctggagtggccccagaaaacttacaatgccagcagaaggggaagcaaacaccttcttctttacatggtgtcagcaaggagaagggcagagtgaaaggggacagggggaagccccttttaaaaaaccatcagatctgataacaattcactatcacaagaacagcatggaggcaacctcccccatggttcaattacttcccaccaggtccctcccacaacatgtggggattatgggaacaacaattcaggatgagatttgggtgggacacagccaaaccatatcacatgtcttcaatttctgcctcctaaaaatgacatctttgccaggtgtggtggcgcacacctgtaatctcagcagtttagaaggctgaggcaggtgaatcacttgaggtcaggagtttgagaccagcctgaccaacatggtgaaaccccatctctactaaaaacacaaaaaacttagcctggtatggtggtgtgcacctgtagtcccagctactcaggaggctgaggcaggagaattgcttgaacccaggagatagaggttgcagtgagctgatatcacatcactgcactccagcctgggtgacacagcgagactccatctcaaaaaacaaaacaaaacaaaaaaatgacatgctcaaccttggtctttcctcaactgtcaactctgagtgctaagaacctaaaagatatctctgctttactgcacagcaaggtctttgttgtgagttgggttgtgtcctctcaaaatttgtatattgaagttctaacccccagtatctcagaatgtgactttctttggaaatagtgtctttatagaattaaaatgagatcattagggtgggccctaagaggatattagggcacggacactcacagagggacaactgtgtgaagacacagggagaagacagttatctacaaaccaacaagagaggcctcagaagaaatcaacactgcggacaccttaatgtcagaattttggcctccaggactatgagaaaataaatttttcttgttgaagcttcccagtctgtgatacttcgctattgcagctctagcagactaatacacccttcaaattcaccagggccaaattgaacccaccattctcctctaaaaatttcttttgctttcaccattttgtttaaggtcctcactcttcccatcactcaaactctgaaagttcttttcccatagtgaaaaggcctaatgaaggtgtttccccatggattctttccttttagttctgtcttgtggactgcagctgactcagccctgagggtgcccttgatgtccccgctcaattagcatctctaccatttcaccattgcttgcatgagacagtcgaagggtcatgaaagcttctgtgatctggaagacgtattctataacagtagcgtttcacagcagaagccagacttgcaacattgcaaagatcatgggatttggaagcagaaaacctgagtttctatttggactctgccacttaccaagtgtagaacttttggaaaaaccttggaaagtcttcctatctccattatggatcaagagtgtgaccttggttcaccctctcaccattctttccttaatttttttttcttataaataatagcttccaccttccaccctgcagagcaattgtaaacttcataacacatgcgaagcgcttgactcaaaaaacaggaagcactaaggactgttaatttaactggcatctcattacttttataagaaagcctagcataaagaaaaggtgtgtccactgttatgggttgaattgtgccctcccaagaaagatacattgaagctctactccccaaacctcagaatgtgcccttatttggaaatagcagcattgcagatgtcattagttaagacaaagttatactagagtagagcaggccctaatccaatacggcaggtgtctttacgaaaagatagcatgtgaagacacaaacatacaaagagaaggcaaccatgtggtgacaagaggagagactggagtgatgctcctgcaagccaagattgctggcaaaccaccagaagttaggaagaggcaaggtaggattcccttacaggtttcagagggagggtagccagctgacactttagactgctaacctccagagttatgagacaataagttcctgttgtttgaagccgcccagtttgtggtacattgttgcagcagccctaggaaactgatacatctacacaatgcaatgtccttcagccataaaaaggaatgaaacactgacattggctatcatgtggatgaaatgtgaaaacagcatgttcagtgaaagaagccaggcacagaagaccacatattatataattccatgtatgtaaagtgtccagaataggtgaatccatacagactaaacacagattaatggttgccaggggctgcaggaggggagaataggaactgacggctaatgagtataagctttctcttaagggtgatataagtgatctggaattagatagcaatgatagttccaaatcttgtgaatatatttaaaattaaattgtgtaacttaaaatggtgaattttatgtggaataatagcaataaaattcaatagaataaaacaaaatgaacgacatgaagcccaacacctcactggaacatgcaaaacccttcctttattctctggtggatcccatttctcgccattgttcagtgctctctatgccccaccatgctgtcctactctcttcatcctctgccttctcccatgctgtctgcctacctatagtccctctttccccacgccctgttttgttcctgtgctgcccctttctcaccctgtactctttcactttgaagtcactgccccagaaccttctctttcactccacgattgggttgtgttgacccacttgcacatcatatgtttctgagggcagaaatgttggcccataattacagttgtctggttatgtctctgtctccctcactaacatgcaagccctacagaagcaggagctgtgtccagcatgttcaccagggtatcttccaagtgtatcacatgatactaggtgctccgtagacacctgctcaatgtcatataggttcttggtcttctcttccaaataaggtagaatagttatttttcattttacaggtgagaacattcaagttgaaagaaatgaagagaatatttgatgtcccgcaatacaggggaaagccgttactgcatcccaggaatgtttgaccataaagcccttccttgcccactaggccaggtatgtcccatcatagagcccctcaccccacttgcaggttacccttccaaagtgctgttccaaaagagctcaccgagacaaggtgatattggagaagtgatagacacatagatctatggaagacattgggaagcttgggaataaacccacacaattatagctaattattgacaaaggaacagcagcaattcaacagagaaaggaaggtcttttcaacagtgttaaaacaattggacagtctttttttattttttagtttttggttttgtttttgtttttaagacggagtcttgctctgtcatccaggctggagtgcagtggcaatctcggttcactgcaacctccgcctcctgggttcaagcaattctctgcctcagcgtcccaagtagctgggattacaggcgcctgccaccaggcccggctaattttttggatttttagtagagatggggtttcaccatcttggccagtctggtcttgaactcctgacctcgtgatccaccagcctcggcctcccaaagtgctgggattacaggcgtgagccacggcacccagtcaacaattggacagtcttatccagaataatgaatcttgatctaaacctcctaatttacatgtaacaaattgcattagttacaatattaactcaaaatggatcgtagatctaagcataaaatatataaatatataatgcttagactaaaacataggagaaaaaatttttccaatctagttaggcaaagagttcatagatgtgacactgaaagcaaagtatagcaaaaggcaaaaataaattcaataagttgtacttcatcaaaattataacttttgttctgtaaaatacattgttaagtgaatgaaaagatgagctgtagatttggagaaaatattttaaaaaagcacacgtctgacaaggactcatattcagaacacttaagaatgctcaagccaacccaattaaaacaatcaattcaattcaaaaacaagaaaacaaaaccagtttcagaaatgagacaaagactcagacataaacttcagcaacgagggcacgcagcaggcagagcagcccagacaaggtactcaatactatgactcactaggggactacaaatcaaaaccacagtgagatcctgttacacacccattagaatgtctaaaataaaaaccacaaacactagtagtgccggcgaggatgtggagcaacaggactaacacatcgctgccaggaaagcaaaatggcacagctgcactggaaagcaatttgtttcttgtaagtttacacatatacttaccacgggaaccagcaatctcagccctggtatttctcctaaagacataaaagcttatgtccacacagacacccgtacacaaactgttataaaagctccagtcataataggcaaaacccagaagcaaactaaatgtcctttaacaggtgaacatgtaaacaaactatggtgcatccatacaatggagtactgttcagcaaaaaaaaaaaaaatactacactgtatacacacacaggtacacacacatatatctcctaatgttagcagaatttttttaatgtgtaatacagcattgtttactataggtaggatgttatgcatcgaatctctagaatttaatcatcttccatacccgaaattttacacaagctgaaaagcaactcctcatgtccctcttctcacctcccagtaacccccattctacattctgcttctatgagtttaactattttaggtactttatctcagtggaattatacagtatatgtctttttgtgactggcttgtctcacttagcacagcgtcttccaggttcatccatgttgcaaatggcaggatttccttcttttgcatggctggataatattccattgtgaggatagcctccatttcctttcatctctcaatggacatgaggttgtttccacatggctgtgtgggagcaagggggtttcttagccactggagcgtcccattgggatggggcactggtggtgacccctaagcagggatgtgccctaatggacttgcatctgatagggtctccaggccactatggccccatgcctgggtgaggttaagagttaaagagtagaaaacaggaggccagtgagggggcatttttgggcccatgggaaggtttctgaggagatggaagggctgcaggtataggttcccaatatgtccccaccccagttcaatttcaatgaccaagggagatagcagaggtaaagaaaacagataagagggggtcacctgacacctggtggacagaagctgacatccaagaggtgattccacccacctccctcctgagcttcctccttcctcaggtccagttaggcaggggacctggtcagtggtgcctagtcacctgccactgtgtgacctcagacaggagatttgtcctgggagcctccttcccttcatctataaaaggggaatggacacagcagcccagaaggcttcgaggaggaggaggacgtgagaaggtgtgctgaatcctgccctgctgagcatgtaggcctaaaattttacacacaaactgagtccctatgaggaaagggcaagccctctgccctctgcccttcctatgtctgcatatccagaactgcctcaggtggagagggcagagactagggagcacccatagatgctctgatgctggccacagcccttgggggtgacagtgatgaggacctgggtgcacatgtggtggagcagccaagaccagccagagaagagacacactcatgcacacacgtgttcacaacatacacattcacactcacacacaaacacattgaatgcatgcgtgttgacagttcaaggagtagaggacactggacctgggccctgctgacccaggcagggccccactctgatgggtgctgtaaccccagacgtcactgttgctgaacatctgcctgcctctgagttgtggagcagctggagacacacagtggtgtctgtgagtgtctctgtgtgcaggacccttttctaagtgagaggcacatctcagcacagctgactgatcattctcgggtaagtgtgacctgctgtctccccttcctgctgacatgggggcagatgctaccagatggcatcactggcctccggggcgctgtggagggtaatgtcgctgagctcccaccaggtgctttctcttcactgaccatgtattgcagccgtctcattcaccctcacactgacttcgtggaatgggtgctaatgtacccatttgaagatgagatgcctgaggtcagagcggaggcaactgacccagggacccagatgtgactctggactgtgatctcagccctgccttgtgctgtcctgcactcaactcctgacctctgcagccttcctgccttagatacaaaatctgctgaggattctggaccccagtgggggtagaacctggctctggaagagccacaggaatggggggccctgtgggtggggttagaggcatccctcagtccaagtctgtgcaagaaaaagttccccagaggcagggatcttatccattcagactttaagtgtgggctctgatggttactgtgggacccaccaggcactggagttttccagtttgggagcagagctgggagccctctgccctcgaatagttgtggaaaatgaagaaaccctggaggtctggccgaaaggtgacagtcattcctcctgttctctgaggcctggggacaggggtttaacctgcaaggccctctctctgacctgtcctccagacgtatcaccttccctttgtctcaggtattcccaggagagatggcccctctgggtgttctccagaacctgtccccaagagttcacttgttctttggtgacctgggaaaacaaagcctcttcctgtatcaactgctcaggactgtggaatctgccctccctccaccaaagggaggctgctttggagacaatagatcaagccttctccgaaccaaacatcctccttcttgactggtgttattcttcaaatggattcactggccacagtgagtaaagatttgagtggaacagaacactcatgagatttcttctttcctatagaaaactgggcatcttcatggtgtctgaacaatagcaggaggctgatcatatagagatttctggttcctggccctagtctgcctccaggtgtccattatagtcatcatggcccttcaccctgagcaggtagatgccgttcatcctgctgtggagtgtgtgcccatttcaggacatttagggacaacaagtcttgttgtctaggtctccttgttttaaagtcctcaggaaagggcccacctctggtcaggcccagggactccagaagtcctggcagaggtggggccatttggcttggtcccattgtcctgggggtgttggtgaaatgaagttcacccggctggcatctgggagcagatgtatggggtgttctctaaagctctcaggtgccatgtaattttgggagtattttgtcttatagggtggatatggacaaagacatggatatcctgctcgcccaggagtaaagggacatcattgccaagtataagcagacacaggtcaggctgctccctccagggaggcgggtctcacctctccctctgttccctggtctgatggtcctggactccttcgggatgcagggcaaggatgagctgcccacacgcccatacccaacaacttttattttggcctccctcaccctctctccctctgccttgcaggttgctgatccagggcaccagtggacacaggagatgaagatgtttacatctacaaggtcatcagtcagcttgagattccacagtgagtcagtcttctgtcctcccaaccaattgccaagaccagctcggtcgtggagaccctaacccagtggcgctagaggaattaaagacacagacacagaaatagagtgtagagtgggaatcaggggctgatagccttcagagctgagagccatgaatggagttagacccacatattaattgacagtaagccagtgataagcattgcttctatagattatatattagctaaaagcattccttatgggaaacaaagcattcttagcgaggagcagagaaacaggccctggctgatatctgcagcaaaagcatgttgttaaggcaaaaaagcatgttgttaaggaatccccctgcagatgtggagtcaggcatggtcactcctgctggacgttaagaaggtgaaggctgaaaacccaagtaagtaccaggtatggtccttccacactcagccacagcggaagaaacaggccaggccatgtcaggagcccgggtctctagctagaggaaaagtcaagcctgagtgatggtcagtcccatatcctaggcacagacgatggcatgggaaccacaagtgaactgggctctggtgaccctcagtggctttggaaataagatagagaaggatatttctgcaaaaaaaaaaaaaaaaaaaaaaatcttctttccttccagaagtgctgaatgattgctgtttgtggtagtgagccttttgtctgttatgaggctggttccttcctgaggaaccagccctttagccctgccctaaagaaaataaaggagcagggctcctatacagggctctcactgtaaagcaactgcgggagagtgagccccagggaaggaccagccccatcctcatccaccacaggttatcagtccaggtggccacttagggaagggaagagggtctttctatgggctcacactcaggagggcctaggatttgggagcagagggagcagaaaataaagcagcagggcaagatgtcctcagcgaaaataaaccagattgacctggacatgaagtgcaccttcagacaccatgtcatgttttgggagcactacagagtcaggtaaggcctatgggggatggagggtcccaggggagacggaggaattcagaggaataggggcatcccatgcaggagtccaagataggacgtgacagagccccccaagggctctcttggccagggagcagccagcatcacagagcatctactgagctccaaaccatgggccgagctggggcatgtgggtccagaacccaagtggctactgaggaaacaagcggtagcaaacacaatcatgctgcatggtgaaaagttctctctatgacccacaagtacctgaggtagagacccacaagaggggctcagacttcacaggcaacactgacaacaccaaacaccatagaggatgtggagccacaagaactctgtgcattgctgctgcaaaatgctgctgctgctgaatgcaaaatggtacagccgccttggaagacagttgggaattgctcacaaagctaaatgtacttgtaccacgtgaccacaagtgtcatagacgttgacctagctgacttgaaaatgtatgtacacctaaaacctacatgtcacattcactgccttattcattatcactaaaacctagaagctactgagatgaccttcaacacaggtcccaggggagatggaggaattcaggggaatgggcgcatcccatgaaatgaggttatacctgtttggtataataaaattacaggttaaatctataaatataaattataattatagattattaggttacatttatttggtataataaaattatacagtaggtattgtcaaatatgaaattaatatctaatgattgtattataccaaataaggcaaatatgtgtcttttggacttaaggggacctaatatcaaaaaaattaatgagtcaaaaggactgaatttagaatttaattttgaaaaaatcaaatatcaaaactttaaaacacctgctatcacaaaataggatcattggtcattggtcattgtaaaataagtcattcatttaaccaaagtgataactcaaagatttcaaaaaaaaaaagtcaaaagacaaaaccattactctttgagagaggagacttaattttccaaacaataagccctaataaagatagcatgaggccaatgaaatctgtttctcaaatcttataaacaaatctattaaattttaatgatcttcaccatactatataatttccaaaaacctttttgtaacattttataattttttaaatgaaaaagtgggttaatactccaagaaaaccttgttaatctgacacaggagctcagaggttagtcttgcatcagtgagcctttgatactaatctttacagagaaactgtaaccaagataaaaccaattttatctttcaaaataggctcttacaatcgcatgtacccacatcttccacaatagcccctggactttgaggggtaagatagtttcaatttctggccctgtgtttcatgagtgcagtttcttttgattatcatcttctcctggttctgaagatacggttttagaagctttcagtgtttaagatttagcaggacttggtgtcctttttagatacaggagtcaaagccctgtaactcaacagaacaaggactttaaaagcaatacagaacattgtatggatgttaataactttaattttttaaatctcagttttcctaggcaaataaaaaacttaatgacataggaattgtttcaataaaatataaaatctgtttgttaggccagttaccaaaaggcaaaaaataaataaaagacctgcagcaattgcttttccctagacttcaagtcaaaactaatgaaaatggtacttgaattagttagatataggaagggtgtgtcttgcatcataagtgaaaattttcagtttcatagaaaaacttcaaaccaagagcacagaatgttatattggaagaaaatatttcctttagacctttaagataaaacacttttagcatcatgtcacagtagcagttagaacctgaggaaaaaaaattatagaaactgacaagaaagttggagagagcgattatctcaggacttatgaaggggagagaaaggtgaaaacagtgagattcaataaaagttgaaatctggggtaaaaaaattaaaatatcttgtaatttgttaagagtaaattaatatcttaagaaaattttgttcttctagcccattcttgagtggattagcatatttttaatatacagtaagtgcaaaagcacagtctctagaaagactaatttccttttaattatagccaacttgatcaaataaattcttttctcataaagtctctttttacaaaccttactatgacttacacaagccacttatgacatgcctagacttcctgttttatcctaaacagccttctttcctaaataaccaatcattttatcttctttttcttttttttaagatttctttgttgttgctgctgttgttgctgctgttgtttccttgagacaaggtctctctctctgtgtcacccaggctggggtgtagtggcatgatcacagctcactgcagccttgacccacccaggctcaagcaatcctcccatttcaacctcccaggtagctgggactatagatgtgcaccagcatactcagttaattttctgtgttttttgtatagacagggttttaccatgttgcccaggctggtctggaactcccaggctcaagcaatctgctcacctcagccttacaaagtgctaggattacatgcatgagctatttgcatccagccattttattttagaacaaacatttaccatgcaagatttttttctcatataaaattttccttttaacctttcttaccaaaaatatctctttatatttttaactgtctttatatcgctcttatttagtggttccttttatcttgtttcataacctttaaataacctttgaattcaacaaaaattattttcctttaaataagaacatattcttagcaaaatgtttttctgtaatttttttaattgtgaatgacccagacatttaataaatgcctgttatgtaatataactttagattctaaattatattatgcttatttacaagcattccttccattacatttacctaagttatttttaatagtttacctagattacttatgaaaactgtgataatcaacatttaaaggtattttcctgttaatcatttatatagcctgtgaatttcaggtgtttacctaagtaagaagcttaaggttaaacaaatgagtttttcgccaataactcaggataaatgacttatttatcaaaaaaaattacacaaggataattatcttttgagttacatttataattttataaccgtcatgccaaattttgacaccttatgtatattagcatttaatcaagctgacttttaaccactgagctttaaaaatcctttaaaatctcattgctgtaaccgagtacacccattttcctgagacatcaattattattttttttctttccttttcttgttccttcagttccccactccctacttaggcttttaggaatgcaaatatagccttttacctccccattaccggactctccctacagtgcaagttcatctaactacacgctcaaactggaaagtcaacttgagaattaacagttgatttataaaccaatcatgcccactgtggaactctcactctttaggaggttgtctcaagagataacagcctgcccatgaaggtgccagcagtcacaagctgattgccccgtagataaggcacaagagctagcatggaccccccgccaccacccttgctcacttcctcccctgctttttaaaagtgaagccatatggaggacacctgcatttcttcccctaagctagttttggaaataaattactttctttataccagacttcacttttgttaattggactctgcaagcaacaagcgactaacctgcattttggttacattaccatgttttaggtgggacaaacttctaatatttcaaatgtaacacaaatatcaaaccagtaaagactttatttaggaaccaaacccaggctgccatggtggaaaaagggcagaaccttagctactgaactacagcatggggcaaccactattgctatttcagtttggcttggctagcaaagggttgttttgttatgtaaataaagcccttcaggtaattgaaatctttcttgtttcgatggctgatttttcttttttttctctttgtttttccagcttcaggaatttagccagttcagaggtcttgttccccataatttagaactttccttcaggtttgaccaagtcaactagagtggtcaaacccaatggaaaaaagactaaaacaacaaaaacggaaccaaacaaataaacaacaacaaaaaagtaaagcaaaacaaatgattgcacaatttataagattactgagcactctaatggtaaggaggaatcaagaccagctggtagttaatcttaactttcagagaatttccaagacaaaccccatttcagctacttatgtaggaataaggcccaggttgaagattgctctctatcatcctagaagcaggaaaaaactcaaaactcatcttccctgttggaagcaagctgaaactctggaaaggagttgcctgctttccattatcatggattcagaaaaactcatctttttggatgcaagtaaaactctagaaaaggagttgaacagcaaaataaaccttagatctcaacaacattttgagaaatcagggattctctggagatgatacctcccaggcctcagcaaatcgtcctgttggttttgttactggcagcaaatccatatgggtctgcagcaatctcaattcttgccttctcagaagaaagaattcgactgaggggcatacggcagagtgaaagattgaggcaagttttagagccaagagtgaaaatttattaaaaagctttagagcaggaactgaagaaagtaaagtccacttgaaagagggccgagtgggtgacttgagagatcaagttcatggtttgatctttgacttggggtttcatacattggcatgcctcttggggcgggggagtggtttgcatctcttctcccttgatttttcccttggggtgggctgtccacgtgcacagtggcctgccagcacttggaaggggcaacatacacattgtgtttaccaaaattgtacacatgctcacttaaggcattcttcccttaccagccgagtgttcctggagaaaggttatatactggttcaactctgccattttgcctgttagtgcacatgcttaagtccactagcccacctcctgagatcttattgggaagctgctgattaccaacttgaggtgtttctattgggaggctgcctttccctggcaccggctgcagccaattattattttcaagaggcagtttaacaacttcctgaccaccatctgatggttgcctgacattcctgggcgagggtccctctcctgacctattcatgtctgactaattacctattgtaacagtttgaacaataaagatagctcaaggccagacatggtggttcatgcctgtaatccccgctctttgggaggccttgcaaggccagaggatttcttgagcccaggagttcaagaccagcctgggcaacaaggcaaaaccctgtctctatgaaaattacaaaaattagcccggtgtggtggcacaagcctgtagtcccagctactcaggaggctgaggtggaaggatcacctgagcccgggaggtggaggctacagtgagcagggatcgtgccactgcacttcaacctgggtgacagagtgaaacactgtctcaaaattaaaacagataaaataaaaatatagctcatactggtaccatgcacaagtagatttgtcaaaggtcagggccaccttcactcagagtctcttccgttggttgccaacttgtaaacgaaaaagtatgtcagataggtctcaatcagtttagaattttcattttgccaaggttaaggacgcacccaggaaacaggtatatgtacctttctcaaagatgattgtgagggcttcaatatttaaaggtgagaagtgggctagatgggaaagagggtgtggttatccacatgttgcaagagaaaaggagtaggcaggaaaacagtcaattatggattcatctcacactcagtaataggccctttacataaggtgaacataagactagctacttgaggagctatttaaccttctatctgtagctatctgctgaggaacaaaaggaaagacagttttttgcatgactcagctttcagcttaattttttccatttggcatagtgaattggagtcctgagttttattttcctttcccacctcaaaccccacaagctttgcgttgttgcagattgtccctctcagaatattttacaagatggtgaagtgcctaatgaacatttcttttgtcataaagtgagtttggatcctgaagaagccatcatcttaatcaggctttgggatcaaagttccccttcacccgaaccctgaacagcacagcagacagggaaggacttactgagatggctgctcccactctccagcccccactttcctgaccattcctggcaggaagagctgctgagcagactccatgggctgcccacacagggtctggacctagctgtcttcctgtgcccagcagcctgtgagccatcccagtcccctatgtgcagtggtcagcacccacaagccagccttcatagggattcagttcatgggtgttgccctgagcctggcacagtggcctccccagcttagcatctgcagttcgggtcagggtgttcttaacggccctcacctatgccttttctggccacacatgagtttggatgaagcaggagtctcttccatagctccttttcatctgagatgtccatgactggctcaagtgaaccacagtgtcaggagaggggcacggaagctgcaccctaaattccccgggacctgtggcaggccttcctggtgacctctgccttctcaggtgacttctgccctcctgggtgacattagttctcccctctcaagtgatctgtgccctcctaggttacctcagctctcccaggtgacctctgcctttccagatgacttcagtcttttcaggtgacctcagccctcctaagtgacattagtcctccctggttatctctgccctccctggtgaactcaggtcttccaggggacctctgctttcccagatgatctctgccttctcaggtgacattagtcctcctaggggatattaactctcccaagtgacctcttcccttccaagtgacctgtttcctcaggtgacctcagctctgccaggggacttctgcctttccaggtaacctctgccctcttggtgacatagtgtgctcaggtgacattagccctctcaggtgacctcaaccctccaaggtgacgtcagccttggtgaagtctttccatgatgactttggcttttgccagaggtaggctactgcgggggcataagccatatcatgccatgagccactatcctgctcatgttccagaatgaggagacatctgggtgctggcccagctgctggccaatgagaggcttgccaagcatggtactctccaaggtgacctctgccctctcaggtgacacagtcctcccatgtgacattagctcacagtggacagctacccacgaggcatcacacagccaggacaggggacggccacactggctgggtaattgtgacttacagacaaggcaccttctgtcccctgctcattttgagcctccagggtatcccctgctgagagtcccacaggagcctgtgactggccagggacctgacaccccaagtcagatgcctcttgtccccatcagcaaatgggatcacagctgccctgtgaccaccttctgcatcctggtgtcacaaccttctggccctgaccttatgcaggggactcttacaaccctgctggtccttccacctcccagctggccaccctcccaaccaccctccctgcccatggctagaccaagcccagatgacagcttctctctgtcctgtgtcccctgccctgaccccacatccaggagaaggccacacaccctccagcacccctggtcaccccaccagctcccacctgtcctcactgcttcaaaggcaggcctgcccttctggagccatggccctggaagccactaagcagtgcctccagccaggccccaggggcattcccacccctcctctcctggccgagaccacatgatggggtcactggatgggacagtgaaaggccttggggtctggaagcaaccaccactgcccaactgccactgcccaaccgctgctgcccaactgccactgcccaactgccactgcccagcctgatggctccacatctcaggagtaggctctgattccttggggccccaggagcctctcaggagtctacatcccaagatgttctaacttccagagtctccaagcccatcaagagcaagttttgctaaaagtgttctgagagcttatgaagcacatggtgagtggtcagtccctcagctcttccccagaggccctgggtcccatggggttagcagggacaggggaagcctggggctggtgagaggccaacttccagccagggcttgatctggttttcaatggattcaaagtttggcctccttttccttacctggaggggacagaggcactgggaccaggccaagctctggctgagccagggctaggggaagtacatccactgggggcccatgccatggggaggtgttggggcacagccaccactgttctacctcttggggaagggtctgcagtggggtctggaatacagaggttttcacggaagcccaggggaccctgaacacttctattccttctatcaggacaaggaagggttgtgcatccggctttccaccttaaactggtttctatggtgcttcatcgatgagataaggatgcataggagaccccaggccaggtacctcctttccccacagtgctcagctcccccagcccaggggtctggcttccccaggaggacccagctcacccccaccccacaggaggcacaggcaggtctctgcagggcacacaagccaggacctgtatgatgggagctttacacaccagacaccagggaattctgggcagactgggccaagacccatcttggaagagccaaaggagccagggaagccacaagccctcaggaagccccttattctgggaaccacatttctgctgagatgagtccatccctatgaagagctgccggaccttgtctgacccagccttatggaagattgggtgggtctcttcccaagcagagggagcctcaggaagtccagactgaggctacagtgggccctgctcaagccaccagccccgaggttggaaaggccaggtcctcccacacctgctgttcccacagacttccttcatgctcatcctgtggctctgggatgtctacctactgggaggtgagtgtgtggtgacaactatggtatacatggccttcacagccacagaattaagtccctgggtggccaatggtgcccagaaggagcatgcaggacagaccctgggacctatagccaggacagattcctggcttctggtgtgtgatgacctgagagcagcatccacactgtccacatggctctctgctccagcctggaggtagggccagaccaggcctggtgggctgggcagggagtggacccaggtaccaaacccactcctgacacaacccagatgaaaggcaagagtgtgttgagcacttccctgcccaggccttcctccagctgtggttttctgtgaacatctggacccctggggcagccacagtaggatccagcaccgcccagtggtgggtgcctggggcaggaacaaggtgcagacactgactctcccacagacccctcccagcctcatagtcaccctgtccctagaacaccccctgaagctgttcctgtttggcttgcaggagttccttcaggacacactgtcctaggcctgggccctggaggaggacatggtgatgaggcaccctgaggcctccatgggggaactgagaagcatgcactgtgacctgcacacccaggtgggcttcagcaccaagtctcctcctgtgtcaccctgcggggcagtaaatagtgggaagtgcccagacctcaccagccctgctccctgggccttcctccagcccctcctctccctcctcctctaagaagcttctgaaaccaggctgcctgagcctagggcaaaagctgaccttgggtttactggacatgcctcagagacaatgagacgtgagcaagactcttccaagcccctcccctgtaccctcctgctctcactcctgaaagccccagaaggacactggaggggtcagatccatctgtgcaagcccacaaccacacctgtgagtaccagcagccctggagagcagcagggggtcttcactcctgagcacccctccaagggcctaaaatcagtgtcagagaccctaagagaatctagggagagggcataggtgaaaccctggcccagagccagaattgattgctcagccgagtgtgggaacagtccagccctggcatggagatcccccagaggagtggagggtgtctcatccactgtggagataagcccccatattgtgtggcaaaggggctaggtaacagttaaggccccatccatctgagctctgaatcaaggctaaagcccaggctaagcagccctggggcaagagtgtgaggcaggaagactgagtcagcctgaaccctgggggctgtccctggagtgacttgagcttccctgacagcttccccactctaggctgcacacacacctcgctctgggagtagcagcctgcaggagtgtcctcagcattagaccagggggaccacacggggaccctgaggactgcagggacccaggtctgtggggtccagcctggcaaaagcaagatgttctcaatggaaaagctgaccaaatctgctttcctttcagccaaacctgagcaagcacccccaccacccaggcctctgcagatatcccccagcattgagaccctccccaaggggatgggctgcttctccctggcccacagcccagctccagcagcccatgggtatagccctcctgaaacaggagcctcatcctccctcaccctcacctggctatgctgtacccaaggccaaagcccagaggcataagggagcttctgcagagcccaggacagcaggctgctctctgggggccctggggactcagagtgtggccagcccatccccagctcaggatagaccacagagtgcttggtgattcctgcattggaactccctctctaagctccccatggacctggacctcagaggcctgtggttttcacagtagagcttggagcagagatgctaggcccctatcacttccatatgtgccctggacacctctaagatcataggactggcctagcccccaataccagacactgcccagccccctgatagcccagaggtagggccagagacaactctcctgcatgtgatgcctacagctgatcacccttggcagacagtgaacatcacggcccagaaggagccagggcagcacttggcaagctgccccaaagccccagagagctccttagacatggaaagtcaatactgatggggaagctggacacttggaggccactggagggaggggtgagcatggtgtccccacagcccaggccacccagcagcatgccctgcatccatggtcccaacctgtagggcagaacccccctctcaacgcacaattcctagacccagagggccctagcccagactcaacctgagccctgaaagggaaggggcaccaggggtgccttggggcctccagcagcagccaagatacacaggagatggagccccctgtggccctggccagaactagtatttggcttaaggcggagcaagcccccttggagcactgcgtacatacccggggcctatgtgtgcctggcaaggccaagctgatgatgttaccaagctcaaactaccactggccaccttggtgagggtggggcagaaacacgtggaccagccaccaacctcatccattcaaggaagcagaaatggtcaggctcctgcaggataagtggccaccaccagaccaccaatggggcagagttctgaggcccaaggagatggcactggggccctgcttccagggtccacaatctgctccaggacacaagactgaagaaaactaagcaaatgagagtccaggaggctggatccctcatctgccattcttggcagttgcattttgtggtcagaaaaagtcaggaaacttggctctactcactgcaggaggctccaaggtgggaccagagcttccagcatagattcaacaatgcctaagaatgcctcttcttggggaaaaggaccccttccttggcctcaaagcccccacttattttgattaaagcacaataaagtctttgttgttatgtcctgcctgtttttgagttgcccagagctctctgcaggaagccctggacatactggggtggatgggaaatgaagatggcacagcccagaccctgaccagcctctcacagcctccccatcccaaaggccgcagcagggccaagcaccagaaaggccaaggttcccacacaactgtgagccacactgcactgcagcctcccactctcaggcagatgccagggttaagaccctccagtaatttcctgtaattcaaactgcacctgatagggacccccagagggctgggaagggagcaaaagttggagttccagtgacattgctcattcatgacagtctgtacaaagcatccctgagagggtctgctgtcacctgtgtctactgtccctgggtggctggtctccggcagccctcccttcctttcttccctccttccctccccacatccctccctccctctcttccttcttctcttgcttccctcatcctttccatctcatctcctctcagcatctggcaatcccaggtcctgagcctgtgccaaggcgggacacaaaggacaccactgacaacaaggcagatgactagcggggtcggggagccttgtggaatcagagtggatggggaggggctcatctgtgcagcccaggactgctgccccgggaacagtctagaacagtgcagaagtgtgtgtccctgtgtgtgcacatgtgcacgtgtatgtgtatgtgtgtgcgtgcctgtgcacacctgtttactcagttctgctctaagtccatgtccacgaccccagaagatcccaggtatgtcctcactgacgtctgctgaaatcaagcatggcccctgctggtagttattgcactgtgtaatgccatcgtcgggacctcagagcaatagaaaccagtggacccctttaggcttttctttccaatgggacataaagaagttatatggacagaagttatatcctgttttctttccattgattcttttaccacctttctcctcttactgattttgaatgaagggggtttttcatgagggtaaggtaactggcaagaaatgaaataacagccagatgcagtggctcacgcctgtaatcccaagattttcggaggccaaggagggtgggttgcctgagtccagaagttcaagaccagcctagacaacatggtgaaagcccatttctaccaaaacaaaaaaattagccaggtgtggtggcacgcgcctgtagttccagctactggtggggctgaggtgggagaatggcttaagcctggaagtcagagagtggagattgcagtgagctgagatcacgccattgcactgcagcctgggcagcagagcaagaacctgtctcaaaaaaagaaaaaaagaaaaggaaagaaatgagataccgagaaactagcaaagcttcacctggctgtctggagacagcccttgtgtggtccccagcccacctcacaggttctaggctggccaccctgtggcctctgtactgtgtatctggacccaggctctgtgggaagggtacctggtctgacaaacattcctccatttttctggctgcagcttggaataggcccagacagcatgtccaggagatgccagacaacctcactatatcctgtgagacaggcccagtgggccttgaaggaaggggtgagcatgaagctgggcacccagagcctgagaccaactgtccctccctgtgccctggaggaggggcctggcctgtcagtgtagatgtggggagagaagggtctgtggacccaggaagggacattggtaggggactttgagcaccactgctcaggggacatgaatgacagggtgggaggcatctcccatttctgccctgagcacagcacccctttgactcctgagggccacgaggagtccactccccagagctttttgtagaacctgcatatgagtccatcagaggtgagatttgcaaatacttcctccagcctggggcttgtcttttcattctcctcacagggtctttcagagtgcacacatcattttgatgaagtccaattgatcatttttttttccttttatgcatcatgcttttggtgcttatctaacaaatatttctctaatccaaagtcacactaatatctacctttttccttatgcaaattttaaagttttaggccttacattttggtttatgatacattttgaataatggtgccatgtatggactgaagtttttaatatgcatatctaattgttctaatagtatttgttgctaagattgtcttttctccactgaatttgctgtacaacttttgaaaaacaattgaacacatatgtgatggtctattctggactctgtattctgttctattgatccatttgtctagcctcttaccaataccataccgtctgaatttctgaacctttacgataggtcttgaagttaggtattgttagccatcttacttaattcttcttttttagagggttttttatttctaatctaggtccactgcattgccacacacagaaacccgtgcccttgagcatacatacatatgcaacacaagtataaatatatgcacagaacgacaaagtgaaatttatcccaagaatgcaaggctgcttcaacgttaaaaatgggccagtataactcaccatattaacagatgaaaagacaacagcacatcattatttcagtatatttggaaaaagcattagacaaaatccatcaaccttataaaaacttccagtctatttctattcctaaaaactaggaatagaagtgaattttcttaaactgataaaaggcacctacaaaaaccctgtagttgatgtttactggacgttattcttaatgatgaaagactggatagtttcaccccagaggaagaactaggtgaggatgtcagctctcactacttgtattcagcatcctatggagagtctagcagtgcaaagggctccttcctttagtagactcagatttccatctggagtcattattctcctgctagatggatgtcctttaccatttctcaatctgtacatctcctggtgatgatttctttcatcttttgtcaatctgaaaacctctttattctgcctttttattggaaaacaaaattttgactgtgtaaagaattctaggttggcatttttttctttaaaaaaaatactttcatacaacttgcaattttccaacaagaaatctgctttgtatctttgattctctgtacatatatgtctttttcttctctatctagctgcttgtaggaggactcagcttctcgcagatagacatgtatgataaagatgcagtaactacatcaagtgtggtattgtccatggatggataaatagactgatggaatagagcagagggcccacagacagacccacaagagtccaactgtgattgatcaccaaggaggagcgtgatggtgaaggactgtgcttgttataatgtgctggggcctttggataaccactgactaagtgggccaagtggccttttggcttaggctgaagcaggataataataacgttatctattcatagaattgttaaaattacctggttttatatttgcaaagtaattagagcagtattgagacaaagggaatcttcagtgaacatttcctctagtcatagttttttccaccacttgacttcctgccctattcagagtcttatgtttgccaggactcaagcacctccttatggggcagactccacagggcatgatatggtttggatctatgttccccacccaaatctcatgtccatttgtaatttccagtattggaggtcgggcctggtgggaggtgattgaatcatggaggcagattttcccctctgtgctgctctcattatagtgagtgagtgctcaccagatctgattgtttcaaagtgtatagcacctctcccattgctctattcctgctgttcctgccatgtgaagacgtacctgcttccccttcaccttctgccatgattgtaagtttcctgaggcctccccagccatgcttcctgtacagcctgtcaaactgtcagccaattaatcctcttttctttataaattacccagtctcagatatttctttatagcagtgtgagaatggaccaatacagggcatcatggtcagtcctggggaacagcttcctggagtgggaggagctcagtcctggtaacctgctgttcccttgcctgaaaccccttgtttcctccaccttccatctcattcaacaaagctcttgggagaacaactttaaggactccctatgcctcttccttcaaaggtagccagccaagaagtagatggctggttgagccatactgactaccatggacagcagcaacagaaggtcaaaggcaaaggtcaggtattcttttcctggcaggtacacaaggacaactaagggcaggccccaaaccaggaagctgatggccacaaagcggacaatgtggtagatccggatgggtgaacagttcttcaggcagtacaggctcctgatgatcaaagtcaggctggaaatgcccaccacaagacaaataagcatgtgaaatattataaagcctgcctgaaattggtcacatgccaggcccttctcccattactcacaaacctggctaaccacatgcaaagaaagggccagggcccagctcaggatgctcatcacagcagaggtgtgctttgggcggtggcagcaccaggtgggacagaggacacacagaaagctctcaatattcatggccaccaggagacagagactcactgtgtcagagaaataggacacaggctccagaaacatggccacctgcaatgtcacctggtgatacagcatgaggattttctccaacaggatcacagttacacaggagaggttgaccatatcagcagcggccaggttaaggacataggtcacgtaggggctgctcctgacctggaagcagaaaagccagcagaccacaccattgcccaccagcccacagaaggccaccagcactgtcaggatgaaaaccacctgtttgcccaccaaccactcgcctcccgtatgactcatgttcacttgtcctggggtctctgtcctgttgtcccaatccagcttcccagagaacactgagagaaactgggccatggtgggctgccttggctgcctgggcacaccctgcaaagacaaaggttggtaacttaccaggcctaggaaggagagtcagggttgccttctgacctgctgggcttcccaagagggtcctgctgggcctcccaagattggtgggaatctcacagagcaaagtcaaggagaggaatgagtctcctgcaagtgatccatccatcccatatcctccactgcagggtaccctctcctgcttgcccccatccctctctccacctcgttcaggtattcttgatgctgtgcccaacaccaggtgtgtatccatgcacctaggtgcccataaaggaaagaggtgcatttctttacctttgttctccaactctctcattgacacagacagttttcatggcatggttttggtggaggcaccaggcaattcctctgccctaaggttctgagatattctgagtcccacatggggcagttgcttttcagtgctctagggaaggtctacccaacctctctcctgctcacctcccctcaactcctcactttcagcacgagggcctcctggtaggacctttatgttgttctgctgcctggaagggcctctgcacatctgtaagctttgtatcctctttccaatctttgccccagtatcaacttccagagaagcttctgcttcctattaacattgcattcatcacatgctgagtgtctatgcaacttacttacttctgcagaaatccctctgtgggaatggaagatttatcaggttttttattctcttcacaatgttgttcaataacttctccagctcctggaacagggtttgacatagaggactcacttgggtatggcacctatggagagctttatgcagctcagttacacttggggaagtgctggtgacctcttcataaaagcaaactttgcttctgaatcacagaagcttctggaacaaagcttgttctgcaaactgatttaaaaaaaaaggcttcttggactcctgagggagactcacacctgaaccctgggctacgtccacaacaggagcaggcactctcctccacattgccaatcacaggtctttctttgtagaatcatgaggggagggtgaccaacttatcctgctttgcctaggactttcccagtttaagctctgaacatctcttgtcctgaaaatcctcatagccctaggaaaaccaaggtggtttgttgcccaacttgaaagttaaacaggagaaggtcagtaccccttctggaatcccacagcttggttaaacccagtgatctgaggagttcatgctgagactgtgagagctgacctcttgggggcaaatcccagctctttttcatagtagctgactctttctttgcctcagcatccccatctaagtaagggctgctgctatgggatgaattgtattcttctaaattcatatgttgaactatcccagtacctcagaatgtgactgaatttggagacagggacattaaaggggtaattatgtttagatgggtcattagggtaggccctaatccaataggggtagtgtcttcataagtaaaggagattaggacacagacacccacagggggatgaccatgagaagacacagggagaaggcagccatctacaagctaaggagagaggctttggaaagaaatgatcccggcaatctttggatctcagactttcagcctcctaaaactgagagaatgaacttctgctgtttaagccactcagtctgtgatctctgtcatgggagcctgaactgatgatcacatttatgatgaaaagtttacagacggaattatggaaagtctcagaacagtgagatctacctggttctacaaccctgagctgctgaagctttgcttctgaatcacagaagcttctagaacagagcttgttccacaaactaactgataaatgcctgcgatatgcctggaaatattccacaggtgaccttgtggcctgcagtcacatattggtgcatcagcagggtttaggagaatgctagggaccagctccaagtgagcccagtgtttgaatcttccctccttgctgggatgatggagtccccttcagttggcagctctcttgaaatggaagggtccagccccagcccctcccctccctgcacttgttacctagacactcttacctgaggccagggaggaccgcagatctggctcagatctaatctggtcataggatgagtcttggggcttggtaacattggtgcccatggaaacatcagggtgacctgcagttctgtgcctgggccagggtgtcagaactcgtgatgatgacagaagagaagctgcaaacagacctccgtggcccaccccaggccaccaaggcaccaagcaggagcagttgggctctggtccccaacaaagaaaggagatttatagataaaagagtttcaaggggagaggtgacttacccttcaacaaagagaaaatgcccattttggaggcagcatgtggcttcagggacagagccaggcttcccatccctgggctcactgagacctagctcatgcccagagaccactactgaggccagtgactaagcagcacattcttcctcatcacacaagaggaggacacagccctcctggggtgggaaggcttcagtgcctggtgcagccccagcactgggcacagagagatcctagcacctggaaatgtcatttccaagtcgggtcatgagccaagctccccaaggagcataaacaacaaacaggttggatcctgggattcagggagccagctctgatggaagtgctcaggttgatgcagccaaaatagccaagtaacctttgcattgggattgaagtacttgctctggttctgagttgagagcccaccctccccacttaatctttatttgaggtgaaatttacataacacaaattaactaatttaaagggcacagttctgcctcacttagcaccttcacaatgttgtgcaaccaccacctctatctggttccaaaatatttacatacccccataagaaagccttttacctgttagcagttactccccttgtcttcctcctcccagctcttggcaaccccatctaccttccatttctgcacattcacctattctggacatgtcctattagtggaatcagaccctctgtgattttttgtctgtttctttcactcagcctcttgttttcatggcttcttcacagggtagcatgcataagaacttcattccttgcgttagatacaaactaaatatgaatatagaagctgtgaaatcagaagacccaaaaggattttcctagaagtcatagactacacctcagtaatacagtggctcaaatcctacctttaacagaataacacaccctctgcccatctacacagctggggcatttgtgaaccaggggccagagcacagttgtggctcacctgctgggactaccctggaaccccgaatcctgctttctccaggaacctggtttctgtcctgtccccattttcctgagaaatgcaccttccccagtaaaaaatcatgaggtttcaaattccaggaaaatatgtctctgagttaaaatggtttgaaaatgaaagaaggaagagagatcttttctcatacctgggaagtcttggatagaattggtaccacagaggccaatgtcctgagagatgaaagttctgcccacaggtcaggaagcaatctaacgatgtctgatttgaactgggtcctgacaagaggttgtcaatttctctgtgtctgttgggtcttcctgtactggggcaaattgcatatcagggcccaggcctttatctgaaacattgtatctcagcatctcctgatatcccccatcccactgacacttttaattactccatcctgaacaataacttccctcaaaaaagaaggatctttaagacaagttgtcacctgcctccctgtgtgaatctcctagaatgacatccagcccagcccagcccatctgagacaggcaggagagggaactctggtgggcattttgtcaataaacttgagcatgccaggaactcaaatgtgctcctttcattttgctgtcaattgaattgcatttttttttttttgcaaaagatgtggaagttcttgtaaatctgtgtcagaaacttacattggattcaccaagcctagggagatttggctgtgctttgttggagccaatatttttcaccctggtttaccccaccactgacttgctttcttttttttttttttgagacggagtttcactcttgttgcctaggctgcagtgcaatggtgcaatctcggctcgctgcaacctcagcctcctgggttcaaacgattctcctgcctcagcctcctgagtagctgggattacaggcatgcaccacaacacctggctaattttgtatttttaatagagacagggtttctccatgttggtcagactggtctcaaactcccaacctcaggtgatccgcccaccttggcctcccaaagtgctgggattacaggggtgagccactgtacccggccttgacttgcttttatgaggcaagaaaagacatgtctccttgttgcactaatttcgatcaatcaataagtcaattagttcattttcattacatctctctgaatcaattgagagataaattgagaagtcaaaacaatgcccaacaacatagcatctttattcctccctcccctaatgacctgggaagcagtttgtgaccccaaagcacttgcttatatgttattctctccaggaattgaatttactcctcaaagtaataggcacaggcacccatggtcaacacctgtctcctgaagcttatcacttaatggagggaacccaggagtatgattcctccatgcagacagtcagattccaaggagaaaggaggaaaagtccttcaaatgccacattcagccccttcttctggatgccccactcagcaaagtcacttgtggctgatgctggtcagagaagcccttccaaatgggaacatgggtgtaggaaatatgtgcttctcacactcccaaaggatcacaaatggggccctgtgtctcttaacttccttatgtacaaaagtacatactcactagaatatgattttacaacatttccatcattcctatacaatgtgttgggaagtgatcctttctgatctatattttggaagagtttgtatagaattgtattatttttttctttaaatgtttggtagaattcaccagtagagacatctgggcctgggccttttttgtgggaagatatgcaatgacagttttaatgtctttacttcttgtaggcttatacagattttctatttcctcttgagtcaattttggtaattagtttttctagaaatttatccatttcatcgaaggtgtctagtatgttaggataaagttgttcataggatttctttataatcctttaaatttctataaagttggtaatgatgtgcccaatttcatttctgattttaggaatttgaggccatttttttttcttggtaagtctagctaaaggtttgtcaattgtgttgttattttccatgattcaacttttggtttcattacttttctctatagtgttttattttctattccatctactcttgctctcttctttattatttcctttcttctgcttgctttggggttagttttctcttcttttccttgcttcttaccatagaaagttgaattactgattagaggtatttttcttttccaatgtaggcatttacagctacagattttcctctaagcactggtttatctccatctcataaatgttgacatgttatggtttcatttcatttcatgcatattctttttaatttcccctgtgtttttttttctttcacctgttatttgtggattcctgaagtttccaactgttggtgattactcattcaattccattgtggttggaatacatatattgtattagttcaatttttttttaatttatagataatttgtgccctcccatctagtctatcctggagaatgttccatatgtgtttcaaaagcgtgtataattcatttgttgttgtcaagtaggtcaagttggttgataatgtttcaggctctgtatccttgctgattttctatctagttgttccatcaatgattgataatggagtgttgaaatcttcaactatttttaatgatttgtttatttatcccctcaattctgtcattttcatgttttatgtatttgggggatgtgttgctaattgtgtgtatgtttataatcctcatatcctcctgataaattgaaattttatcattatagaatatgcctctttatttctagtaacgctatttttctcaaggtctactttgtccaatattagtagagctgtctcagctctttcatcatagttttctacatggtatacttttttccaccctctttttttaacctattcattttaaaatcaaaactgcctctggtagactgcatataccagacattggacatactaggtgaacatattagacgaacaattttaaacacgttcaaagaactaaaggaaaccatgtcaaaagaactaaaggaatgcatgagaatgatatctcaccaaatacaaaacatcaataatgagatggaatgttaaaaaagaaacaaggccgggcgcggtggctcacgcctgtaatcccagcactttgggaggccgaggcaggcggatcacgagctcaggagatcgagaccatcccagctaaaacggtgaaaccccgtctctactaaaaatacaaaaaattagccgggcgtagtggcgggcgcctgtagtcccagctacttgggaggctgaggcaggagaatggcgtgaacccgggaggcggagcttgcagtgagccgagatcccgccactgcactccagcctgggcgacagagcgagactctgtctcaaaaaaaaaaaaaaaaaaaaaaaaaaaaaaaaaaaaaaagaaacaaataaaattcagtaattgataaataaaatcgtagaaataaaaacttcactagatagcctcaataacagatttgagaaggcagaagaaagaatcagtaaatttaaagataggtggggaaattatccagtatgaggaacatgaattaaaaagaagaagaatgaacagagtttcggagacctgtgggacacaatccagtgtaccaaaacacataaacgagaattttcaggagaggatagaataaaaggaacagaaggaatatttaaagaaatactagctgaaaaactccaaattcaatgaaaaaatgttaatctacactttcacaaagctcaacaaacttagataaaataaattcaaagagattcacacatagaaacattataatcaaactgccaagaagcaaagaaagaatcttgagggcaaaaagagggaagcaacttatcatgtacaagagattctcagtaagaataagaactaatttctcatgaaaaattacagagtcaggaggcaatgggatgacatattcaaagtagcaaaagtaaaatactgtcaatgaacaattctaaagccagcaaaactattcttcataaatgaactagaaattaaacattctcagattttgaaaactgagagaagctgtaattaccagacctgtcttatgggaaattataaaagcagtcttgcaggttgacatgaaaggacactacatagcaactcgaatccacatgaagaaatgaagaactccagtaaagataactacatgggtaaatataaaagacagtataaatgcaatttgtttgcgatttcctctctcatatgatttaaaagacaaatacataatgaaataattataaatctgtattgataagcctacaatgtataaagatgtaatttgtacggcaataaaaacacaaagaagcagaagagaatggagctgtatggaagcaaaggttttgtgtgctattgaaattaaattgctattaatctgactaaattgttataaattattaattgcaagatccagggcaatatttaaaaaatacctcaaaaagtatagtaaaagaaacaacaaggagaattaagtaaaacactaacaaaatttatttaacatacaaaggcagtaataatggaatagagcaataaaaaacacgatataaagaaaataagtagcaaaatgacaggtcaaaatcctatactatcagtaattacattaaatgtaaatatattaaacaccccctttaaatggcagagacatgaaaaaaaaaaagaaatcctgtcattcatggcaacatggatgaacctggaagacaccatgttaactgaaataagcaggcacagaaagataaagactgtgtgttctcactcacatatggaagctaaaaaatgttgagctcattagaaatagagagtggaattttgattattagagcacaggaaggatcgaagggaggagagagggaaggataggaagagattggttcatggatacaaaattacagctagataccaggggaggaggctggcaagatggtggaataggaatagctctggtctgcacctcccagcaagattgacccagaaggtggatgatttctgcatttccaactgaggtacccagttcatcttattgggactggttggacagcgggtgcagcccatggagggtgtgccaaagcagggtggggcatcgcctcacccggggagcacaagaggtcaaggaactccctctcctagccaagggaagccgaagccttgagggactgtgtggggaggaacggtgcactctggcacagatactgcgctttcctcacgtcttcgaaacctatagaccaggagattccctctggtgcctatgccaccagggccctgggtttcaagcacaaaactaggaggctgtttaggcagacaccaagctagctgcaggaggtttattttttctgattaagtcaagcagcagttctcaccgtggctaattaggcctcccactgggacatttggcaatgtctggagctggttttgattgtcacaattagagaggatgcactactatcacctagtgggtagagccccgagatggtgctaaacaccctacaatgcacaggacagcacccccaacaaaggatgatccagtcaaaatcgtcagtagtactgaggtggagggcactgatctttagatcttgtgactaggctttttctttctgagtaacatggaaactgctgaaagattttgagataagaagtggtatgatctgagttgttataaatgggttactctggcttccatgttgagaatatactaaaggttaagggaagaaccagaggattatttcaatcatccaagcaagagatgttgacaaggacagaccagagtggtggtcctaacagtgataacgacttgtcagtttcacaacatatttttgcaggtagagccaatagaatttgtgggtagattatatgtgagtgagatgaagaagagtcagtatcacaagatttttgtctgagaaactagaagaatggattttcattacgggagatgagaaaggctacagaagaagcacattgtgggggagagggtgggtagtaaggagctcagtttatggcatgttaaatctgagatgtgtattagataccaaaagctgctggtgggtagacaattggacataggaatctggaggttaggagaaaaatccagcctggaaatataaatttaggagtcatcagcatatagatggtgtacaatgtcataagactggatgacggaagtgcatgtaagaaaggaaagaggactgaaccctaggcacagcagggagaggaggagaaaccaataaaggagattcagaaggagcagctgggagactttggtgatttgaagctgtcagtcagctcagactgccataacaaaataccataaactgggtggcttcaacaacagaagttgatttctcacagttctggaggctgggaagttcaagatcaagatgctggctgattttgttcctggtgatggctctcctcctggcttgcagacaactccctacttgctgcctcctcacgtggcctttcctcttttataaggaaactaatcctatttggccctcacctttgtgacctcatttaactataattacctcctaaaatgcccatttcaaataccatcacattgaggattagattttcaacatatgaattttggggggggacacaattcagtccatagcagaagtgaaaggcatgttccaaaaaggaaagctaagtccactctattgaaaagcttctaacaggtcaagtaacatgaggactgaaaactactatatcaatgtggaggtcagtttgtgaccttcgatgaaaggtttccagtgcagaaaccttgttggagccaacccgaaagagaattcaaggacttggatggtagctagggggaagtgaagtcaagagaagattattttctgatgagtgaaatcaaagtatgtttatgtattgatggggatggtccactggaaggacaaattatattacaggaaagaggggaaagattagagtaatgtccctgaataagtggaaagggatggaatatagtgggcaagtgggggtactggcatcagacagatgcaaaatagtatattcctagcagtatcagaagaaaaggtggagtcccatatgtgagcacagatgcaagtaggtgaacaggtgggttagtaagaacttctctttttattgctttacattttttcagtaaaaaatgaagtaaaatttttatctgagaaagatgatattatttgagagagaggagtactggggatttgaggggagaccagaaagtatgcatgagttacgtaggagaggggaaagtgagtggactaggaaaatatgattatcaatgacattagccccttcctcttaaagtagtggtcatgaatgtaaagtgaaacctctcagtgtggctattggctttccttcggccacagtcagctgaacaaatatagggagagagtaggactatagttggatttaaataggaaagcaatttagctgaaagagtgtaacaagtgaaaagggcaggaacattgatgtatgcaaaggagtaatagtgattgacgagacagtctaagcttgatagagaactgaagatacaaggggcgtgaggggccacgatgaatttgcggacctctcactgaggaagaaactgagaggaaagtatagaaagataatctatgaggatactgaattcaccaagaatcatcacagtactggagagagtgagaggggatcagggacaaaaatcttcaaggacgaaggaggagcaaagggaaagagaatgatgagagccacaagtggggaggtggactttggagcaaagctgatgacataacagtcaaagctacattcaaaactaataatgacttcaacaaatctacaaaattcctgacagaaagggttattttccttgttttacagatgatgacattgagagtcactgaagttaaacaattagcttaaggtcactccatcagagaatgaaattctaaaccagttccaattgaatagtagaaatgttaatgagagggaattacgctgcctttggccttcatacactgccagaggcacactaccctaaagggactttccctccagaatttcctcttccccactcttggggactcctctccggacaccttcatgcaaagtactaatgataggagtgggacatctattccccagagctccatcctctcttctaaataacagggaacgttgagtcccctgttttttctctagtgagagcactcatcagcatgcttcctccttctctctaactgtgtcctttagatccaggagggatatttgctaccaccaccagctaatgctgatttgctaccagcacaaggcccaggtccttgtctggtctgtaccccattacaaggttctccaggaacagacatcaccacctctgcctagatcctgaaatttcacaaatgtaggttctttcttacccgttctttttattcctctatttacaagcacaatgacacccacccctcatcttcttcctgaaatacctggctctgatctcaggcatccattccagaaatcaacacagctatgcaattgcatcttttattaaatactcccaactccatttcaaatccagagaatccagagcaggagcaagagaccaacctatcatctggaaactcaaggtgtaaacattagtgccaaagattagtcatgaaggtaagttgggtattacagtgccctacaacaaaatggtcttgtgccgagagccacattctgaaataccaagtgaagtttgatgacacattatattatatatttcacaacagatttgtcttctagatgtgtgagggagatgatgggtttatgtgtacaggtgcacacatgcctatgttttggggaatttgtgcatacatgtaacaagaatgttatctgtgcagttttattattgtgtgcctgttttcatggtgtggcatatttgaagaggaatggtttagagcttgccaggctgaacagttatgtgtccgtgtaatcaccgcattaaagaatttgaccttttgtaactcaacatctctagccaccattggtctgtaagcctgaatgtcacctctcctactttattcatctctgatatgaccccaaattataaaatgatctataaatataggtaagactttgcatgtcctttcatactccacagtctctagcacagtggatcctggttgatcaaacaggaaggacctcgaagttagtcaaatataagtggaaaacctattaagcatttacaaataatgtggccttgggcaagtaatttaacttcagttactctcctaacatactctataaaataaggctattgcctaatattcaagtgagttaagattagagttaataaatgaaaagagctgtaaatgttcatagcagttgtatcactgcctagcataagaaccccttaaaaacctgtttcttaatttgggaaacagatatgacgatagttagcatttattaaaggatgacagttaacaactgctatgtgccaggccttgttctaacagcttttcatatttagcccacttaacatatttctattttcatatgaggaaactgaggcagagagaggctaagtaacatacccaagtttttccagctagaaaatggcagagccaggactcaaacccaggcagtctggctgctgagccctggttcttaattatgacattaatgcttattctgcccagtgaggataaaatgagtgaaacataaaatcaaacaggatgttttggtagggagcagtgttttttccctctgaaaaatgaaaaattaggttattgtgattttgtaatttacagcagtgaatatgatgtgaaaaataagttatccatataataatttatgtcaggagtcatgcagcagaaagatttctgtccatcacgtaaactttcatccattacataacccatatgtttctgtaccattaagacacttggttcaacaagacccttggagaatgaggttccttttgttccctggggttctctttttattttatttttggattaatatttgatagtaaagccaaggatttgggacaggaaacttagatgacatctagttcaaactccttgatttacatatgaaaaaattgagacagagggaaatgaagatttccccatatcatataactggctaaagggagctatgtaggtaaaaccaagatgtcctgatattctagtctaccagaaagtgttctttttttctacccaacttattcctgatttaaaggctagtatacgtgtgctgatctcccctcagtgggaggggcatggacgttgggagtagtctctattcacaacaaattaaaaatcagtaatcagccgtataatgggttgtgttagaaagtaaactaaggcccaataaaatatttaagagtttatttgagcagtgatccagaagtggctagggagctccccagagagaacatgaggaggaggctttttaggacaaatagataaaagcaaagataatatttcattggttacagttatacagttacacagttatacagttgccttatttggtctatcccatgaggaagtcctagttactaattacgtttttgttggctgcttctgattggttgagcttaagttctgtgtttctttaacataggcatttacaagaaataccacaaataaagtttcagacatgcttgcaaatcaagcaaggttaaggtcacttaggaggcccaactggctctgtctgctcaaggattcttctggcctcgtctccattttacatgaactgttgcataaataaacacagagtacctgaaacaacggaggtgatcattctgcctaccgagtgttggccaggccaagcttggagtgttgctcttattcttagggagtttatttttaagtaatctcatctgtaaatgggattacaatccacaaactgaccttgtatatgattccattccttctcccagcccagccccacactccaaggttttccctttgcttataaggggtagtcacccttttttatttcgaccttccaaacattctgggagttttcctcctttaggccaactacagcgcagaggagcgctttctcctgctgggtttctccgactggccttccctgcagccggtcctcttcgcccttgtcctcctgtgctacctcctgaccttgacgggcaactcggcgctggtgctgctggcggtgcgcgacccgcgcctgcacacgcccatgtactacttcctctgccacctggccttggtagacgcgggcttcactactagcgtggtgccgccgctgctggccaacctgcgcggaccagcgctctggctgccgcgcagccactgcacggcccagctgtgcgcatcgctggctctgggttccgccgaatgcgtcctcctggcggtgatggctctggaccgcgcggccgcagtgtgccgcccgctgcgctatgcggggctcgtctccccgcgcctatgtcgcacgctggccagcgcctcctggctaagtggcctcaccaactcggttgcgcaaaccgcgctcctggctgagcggccgctgtgcgcgccccgcctgctggaccacttcatctgtgagctgccggcgttgctcaagctggcctgcggaggcgacggagacactaccgagaaccagatgttcgccgcccgcgtggtcatcctgctgctgccgtttgccgtcatcctggcctcctacggtgccgtggcccgagctgtctgttgcatgcggttcagcggaggccggaggagggcggtgggcacgtgtgggtcccacctgacagccgtctgcctgttctacggctcggccatctacacctacctgcagcccgcgcagcgctacaaccaggcacggggcaagttcgtatcgctcttctacaccgtggtcacacctgctctcaacccgctcatctacaccctcaggaataagaaagtgaagggggcagcgaggaggctgctgcggagtctggggagaggccaggctgggcagtgagtagttggggaggggagaaagtattaagccagaacccaaggatggaaataccccttagtgagtcagtttagacttcaggctgttcatttttgtatgataatctgcaagatttgtcctaaggagtccaatgggggatatgttttcctcccgtgaggaaatgtttagttcttgagggaaaatccctaaatcctctatatactcaggtttagggaaggaaaacctacccctcacaactccacgcgcagggaaaatgatggacgtgatgctcgcctttagcttcctccctatctgatggaagaccatggaagacctcttggtctctgcaatcagaagtctcaagttgacaagaaaatcatagtccctaccctgcaggagagggtacatccagaaaaagcgaccatggactctattctcagaaatcagtccaacttagtgcagacctggccagatgaccagtgccctccccggggcatttcacccataaatgtgatgaggaaagcccataaatggtggtgaattttgctgagtggggttaagactggaaacccccctgcaggagttggttcttgagcaagttttaaagaaacaaggaactaggatgagtgtggaagaaggcgggcacgtctcagcccgtgaaaaaaactcacaggtgatcagtagtgagtcatgagagagagagcaagagagagagtcagagagaggagtaaatggagggaggaagatggaggaagggactcaagttctcaagacaggaacagggatctcctcatgaaaaaaagaagagaggaaaatgctcaatcagcagaacctgagcagaatattgaggtcaacccagaagccagctcctcacccaccctcacccagactggcgccctcatcctggagaagacctgctagaccctaaggcaggtaggagagagggtggtccacagtcccccagctttagaaagtttgttcgctcccaatgtccatctacccctaggaatccccactagttaaacagaattgctagatccctgtggaaaatacctttccttgcccaccatcatccccagaaataataactattttagttgggtgtgagacatagagaataaaagggggcatggtgccagacttcatttcatacaaatagctttaaaggagaagaggggggaaggagtttaatttagtttctaaaatgtttagtaatttgattgtgatcatgtcagagcaactaattcattttataaaatatcatttcactatgctctataagtagaaattcaatttggttcaaccattattgagtgatataaataaagcactggacttaacaaagacagaaatacagaaatcagtagaacatggatcccaacctaaaacttactctcttgtcataaaggaaaggagataggagtttttgcataaataacaaggtatcaagacagaattaaattccaagctggctttgaatgctctattttgccttaaaaatttatttactagtctcagtaatacattagtaaaaatcatgtcacttaattaattgtgttagaatcaaagaaacatagagttgggcaatatacttcatcctacccatcccacccaaatcttactctactcatctcattctcattaattttgggaaatcatcagaagatgtgttcgttgagtaagagattaaaagaaataagctttttgacccctgccaacaccccatgcccagggtggtcaccctccaatacaataagatgccaggaagagtaagttgccctttctgatgccgtaatctgccatcatcttcccatcttccagtctctttccattgcaagtcacaatctgggtctcagggattatacccgtcttagtctcgatcattgctttcacttgtgccactgagctggaccttcgcacctggaggaggtgcctctttgcctcatcacctgactccacaagaaacaagggcagctcctcatcactgggcttcaccactttcagggtaaggtggatggtcttctctttgtcaatgccgtaagatgagaggcttctccgtggctttaagatcttggagcccagcaaaagaacctggtcctgcacaggaaccttggtcttagaccggacatgttctttgatttttttcacgctgtcatatgggttggcatcaaaggtcattaaatcccattcctcggaacggacatgcacctgggaagtgaaagccacaagacagttacctaggatgcctgcctcctttacacttctactccccaccacaatggctccccctcttccactatctatctggtcctctagctcctattcagtagccagtgtccctctctttcttggaacttcttttttggaattaccaagttacaacacaaataagataatttgtcccattcctttataatcacacctttttttcgatcttgagaatggaaaataaaatcctgagcccccaaccaactgaacggacgctcttttgctcagggggaccctagagaaactttaaaaacttagtcattgggccaagggtggtggcttacacctgtaatcccagaactttgggaagctgaggcaggctgatcaattgatgctgggagttcgagaccagcctggtgaacttggtgaaactctgtctctactaaaaatacaaaaattagccagtagtggtggcaagtccctgtaatcccagctactcaggaggctgaggcaggagaatcatttgaatccaggaggcagaggttgcagtgagtggagatggcactactgcactccagccagggcaacagagtgagactctgtctcaaaaatataaataaataaaacattcagtcatgatggaacaggaggttggatatgcctcattgtatcttctcccttttgcagtttagacacaactgaccagcaaagttagagattataagactgagagaatggattctttgtggcaataagatagcaaattataaacaagaccgagggctataacaggcaaaagttaagtcatgcatcccttacacttaaagaataaactatgttctgccacaaagttttttcttttttctctagcagctaaacaagcactggccttgacaggaacaatattaaaacaattacagctcaccctgtgttggggaacacaggctaactgaccccgtgttccacaagccataactacagttttaattggacaaaagactgatttcagtaattttctcctgataagagaccactgaccatggactggttctggctagtttacagaagctgtgcatttgaatgcctttgtgtccctgcttcaccttttcatgtataaggcctaactgtaatgcaattaaatgttaagtctccacttcagagtgaccatgggtggtatgtaacatgcaagcttattcaatatgcatgcattaggaccccctccatgaatattcattgcctctgctataacctattggatatgtatacttagcaaaccccttcagcataaattcctgtgtcacctttcctcctgcaaagtgcttgcttttggttttcaatcagaagcaaaacttcccagcctgtcagaatggctaccttgcagactataacctttcataagaaataaactccccttctaaatttatgaattgtgtgattttttttagttgacaatctttacatttcgtttttctgtgcatttcaatggatgtaaaaaacatacctttatccatctcaaaatgtaattagtgattttccaccttatttacctgcctctcctatccagataaagtttgtcaaatgtcaacaagtaaatacgaggcttcaaaagatgtacatcagactctaaaaacaactctcaaagagaatttccaaaatatgacagcctcatgaagatactcatagccataggataccctctgtcaatacttcagaaggaaatcctgggtaggacacataatcactgaactgttagtttcttttcaaatatcccactgctttataataataactcacatactaccgtgacactatgttcagtgtttcttgttaatttatatttcttgtgtttttatttctatctaatgagagacaggactagctggatttcctaggccgactaagaatccctaagcctagctggggaggtgactgcatccacctttaaacacggggcttgcaacttagctcacacctgaccaatcaggtagtaaagagagctcactaaaatgctaattaggcaaaaacaggaggtaaagatatagccaatcatctattgcctgagatcacagcgggagggacaatgatcgggatataaacacaggcattcgagccagcaacgctaccctctttgggtcccctccctttgtatgggagctctgtcttcactctactaaatcttgcaactgcactcttctggtctatgtttcttacggctcgaggtgagctttcgcttgccatccaccactgccgtttgccaccgtcgcagacccgcggctgacttccatccctcggatctggcagggtgtccgctgtgcttctgaaccagtgaggcgcccattgccgctcctgattgggctaaaggcgtaccattgttctgcacggctaagtgcccaggttcttcctaatcgagctgaacactagtcactgggtccacagttctcttccgtgacccatggcttctaatagagctgtaacaaccaccacatgacccaagattccattccttggaatccatgaggccaagaaccccaggtcagagaacacgaggcttgccaccatcttggaagcggcctgcggccattttggaagcagcccaccaccatcttgagagctctgggagcaaagaccccctggtaacactaatatagaatgtgatctcctttgataagactagggcctcactcacagaaggtagggactatatctaagtcttacttcaatagctggaaaatcctaaaagatgggaaaactcacccctaatggccacttgaaagcctgagaagacctccctcatactccattcagaaatattttcccaatctagatattgcagacatttcttcactggaagatctgtgttaagcattgccttaattccaggttctctccatagtgcatattttcttatataatgtaatgtgttagatcattaacaacttcagatgaatgagttttgtgaagctctcctttgagaggagagggaagattaagtttaagaaccttaaaaaatgttaccataatttcaaatctcaccagccctgtggaacacaaagctcacccccactttttcttctaccatttatccctaagagtagctagtccaatgttttatttaaaaaagaacacagaagccagataaccagcttctcttcagacaatccctcttcccattctgcaaatgtcaatgccagcctcttctcctgaaggatgcctgcccagccccccagagccctgagtactgcccagcccccgtttctaagatctctccccaactcttgaaagtgcttttcctttccccatcccctttatcaaatcccaacttacacagaggcaggaagcattgggagccatctctgcagacaaggggccagaaaccagagacagaaaaaggactttgcatgcagcttatataccagagttgagttggaaatcccctgcctggattgctgtgtttgtccagctttgctgtgctctttgttcttgcatgctcccatgaattttctttcacttttgctgggcaggagttaatagacaaagaatgctttctgatcacatacttctctcctcaagcaatctatttgcaaacctcattccaaacatgggatggtctttctgtgttgaaaacttttcccttttctcaggaaagatctttgtctgttgaagccacctggatctatacccacagcccaaacctaagctgcagatctctatgtctagctgtgtctgtgtctatgggaattctcgttccttgaattcccggcatatccttgaacaccccaatctctctgccatctccacgccactgagcatgccttttcctccaactctatccccaccaccatgaatttataagaacacacggtgtaaacagtatcttcgtcaaaaagccttccctaactcttttcctccccatcctgggttatgtgtccatcttctatcctctacacttccttcaaatgcctctcagagcatgtttcttcaacaatagcatcgtctgcttgtctgtaatctttagaaaagagtaggaatcttgggggtcgtgattgtgtcttaattaacttgtatctttagcactgttccagcatgctgtcaggcacaggaaataatttataaatgtttactaaatgcacaaatgaattaataaatgaatgaaaagtaagtaaataacaaaaaaaggaaaagtaatatttggtgagtacttaaatttcaagaactgcacaacatattattaaatgttaccttatttactgtttcagcattttaatgaagtaagtacaggtgctccttcacttatgatggggttacatccctgtaaacccattgtacactgaaaatatccaaaatcagaaatgcatttaatacacctaacccaccaaacatcatagcttaacctaacctgccttaaacatgctcagaacacttacattagcatacagttggacaaaattatctaacaaaaagtgtatttactactgaagtgtgaaatatctcatttaagttattaaatactgtactgaaagtgaaaagcagatgattttatgggaacttgaagtaggtttctactgagtatgtattgctttggtatcactattaaataaaaaatcataaatggaatcattgtaaggaaccacctctattagtatccccgttaataagtaagaagctacctcatccacaatcatattagtagtagctggtaagcaagggttcaaacactaatctgtatttctatagtccttgtattcttcctatattattatgttatttcagtgggaaaaggcagggagaaaagtgctactggagttgggtatttccagcatggggttactgtgagggcaaatctaatatactctcagaaaaaactaattcaggggattccctacccagagatgacctggattctgggaaatagtgccctttcaagaaaacatatgaacaacaaacctggactctgacctctctctctctctttactcttcccttcctatgggaaattccctccctgcccaaagccagggccaggactgtcccagacaccttggtgcccctttgctgaccacaggcaggacttcatcttgggacctgacctccttgcttcttacccagtgtcaatctgacttttttctgtctctctctatgtcacaataagttctttcagagacagatctcttttcatttgctgttttagtctcttttgcatactataaaggaatacttgaggctgggtaatttataaggaaaaaaagtttaattgattcatagttcctccaactatacaagaagtatggcaccagcatctgcttctggtgaggcctcaagaagcttttactcatggtggaaggtgaaggagagcaggcgtgtcacatggcaagagagggaggtaagagacagtgggaaaaatgccaggctcttttaaacaaccagctctcttgtgagctaatggagtgagaactcatttattacaatgatgacagccccaggccattcatgagggatctgccaccacaacccaaacatctcccagtgggcccatttccaacactgggggtcacatttcaacatgagatctggagagtacaaacatccaaactacatcatttacccctctgacaaattcagaaaaccaactaaagtgtcagaggtgtttgaaccagagcaactccatcttgaataggggctggataaaataaggctgacatctactaggctgcattcccaggaagttaggcattctaagtcacaggatgagagaggagatcagcacaaagtacaggttataaagaccttgcaaataaaaggaagcagtaaagaagccagccaaaacccaccaaaaccaagatggcaacgaaagtgacttctggtcattctcactgctcattatatgctaaataaaacattaacatgctaaaaaatattcccaccagggccatggcagtttacagatgccatggcaatgtccagaagttactctatatggtctaaaaagaggaggaaccctcagttccaggaatttcccacttctttcctggaaaacttgtgaataagccaccccttgtttagtatataatcaagaaataaccataaaaatagtcaaccagcagccctcagggctgctctgcctataaagtagccattctttttttcctttactttcttaatacgcttgctttcagtttactctatggattcaccctgaattctttcttgtgcaagatccaataacgctctcttgggggctggatcaggatccctttccagtaacaaaagtaaaaagatgatggtatgaagatcttgccaagttataaaacaattgtggcggttatctacgagtgtcccaatgtggccctggctgacgggatgctcttgggcctgtcactgcccccattgaagcctacttgaagcctacttggaacagatgtctctttctagtctctttaataacgtccatgaaagagtttctaaactgctttgagatctagaatattgcttcaaaaatgccaaccaaactcagtcagaaagctagtgtgaattctcatttattggtgattgggaaaaaagtctacactcaaagaagaacagtttgaaaatacctaccaaaatttaacatggacataccaaaccaagacaaccaaatgcctatcagtattagggaaataggtaaccaaattgtagaatatcataagcagcataaatagaaggatcatacctgcaaacaacgatacagatgaatgtgctagaacctattgagtgaaaaaagtgttagaaacaaatgcttattccacggtgccgcaaagaaatagcactcagacataaattcaattttctcagcaaggaatttttacttctatagaagggtgtgactcgcggatggagtaatggcaagagcatacctggacaagggaggggaaggagttcttattcctgaggcaggtagcccctactgctgtgtcgttcccctattggctaggtttggaccacacaatctaagctaattccgattggctattttaaagagagcaggggtatgagccagagcggcagggtgggtagtttggtgggaagggtggttacagaacaggtgactcaggatgattcaaatcaaagcaggtggccgagggtgactccggatggagcaggtgaccaggggaacagatatgaaccactgattagaactgacaggaaagttgtttactgaaactagaggcaagagggtgaagagaacccggaagctcaactttcaaatggagaatcaaagaataagagagatgaatatgctgacatactgattctttgaagagaatcttggagttcactatatctaacaaaagcaagatgagtaagactacataaagtatgatactctccataaatctcaaaagcaagcaaaactacatagtgagacagagaaaaagaggaactacttgaaattcaggatatgtctgctttttaacaaaaatgaagcccaatctaaattttgatataagctacttgaaggagattttcaacaggaagtaagagggcattagaagccctgatattatttcatcttgccatattcagaatctgaagtttaaccaagagaacttaatgtttgttaaagcaatttattacttgagagacataccgtatattcactttattaaaggtaaagtaataatatctaaaacaaatgttccaaagaaaactaaacataagcaaaactgaatatagtatctagaactacatatgtaagcaataaggctcttataaaaatgtaaaaaccatgagtgttcattatgctactattatgttttatagtgttacattatattattctatatgggttacatttatttatctgtagtatcaaagattataataaaaatataatttaaaatttttcatgttcatatcctctagctcagcaattctgcttctaggaacttatcctattagtactcttttggtttttttttaaggagtatcactcttgcctcccagcctggaatgcaatggcgcgatctcggctcactgcaacctccgcctcctgggttcaagcgattctcctccctcagccttctgagcagctgggattgcagtcatgtgccaccatgcctggctattatttatttatttatttatttattatttttatttttagtagagatggggtttcagcatgctggccaggctggtctcgaactcctgacctcaggtgatccacctgcctccgcctcccaaagtgctggcattacaggtatgagccaccatgcctggccctattagtacacttatatatgtgtgaaataagccatgtacaagaatattcatgtgaaataattatttgcaactgaaataaatgggaacaacacttatcaatagacaactaaataagtgctggtgtatacagttgaattaaatttaaaagccaagttgcaaaatatatgtataatattttgttatttagaaaggaagaaaatatacacatatgctaaaatgtgcatacaacatctctgtgaggagacactgactctgcaagttgcctgaggagcaggaatgagaggtggactattcattatatgtcttatcttattattgttgctattttttagttttgcaactgtgcatgttttacacattcagataggcagatagtatgggaagggatagtatattttttatgtagtcatcagctcagaatggagctggctataagctatgcaccaatgggaaccagtttcagtgctcatcactagttgacaggcaaagggccatgaaaagttggtggctatagtaggttaactattgtgattctgtgccttccctactccccaaaatttattttccactaatcttttacatactgcaaaatttagaaacattgataatatagcccataatatatctgaaagcaaagaaatttataattagctaaaatcagagaccaaacctaatgaaaaaaaaaaagtaattctgagacaattgctgagcctggtacatgggactgatgtcaatgtgcaaaaattgtccaacctgacaaagcaactggaataactaatgcagtcataagtgcaggatgatgtgttgaccaatggcgcatttccactttgtagcagtcaggccatcttggagtgaatccaggctctgcctcctacttctcatgcaagttatttggtactttcttttgtcagctggggatttcggatttcacttaggattaggctctgctaccattaacagacatctgaaaataatgtgcctttaactaaaaccccaaaaggaccagatcttagaagtcaaaatgacaaccaaggcttaaggagttcaccctagaaccaagaaaaaactgcaatgatccattccagcaaaatgtaaagccagtttttcagaagttcaaagtgataagtgggtaatatatctgcttattaaacaagattcaatacgcttcagagaaagataatagaatacaaaatagataaaggtaatagaatacggaatctctgtaacatattactcacatcatcaagtgtaaaacaggaaatcaccaatcatgtgaagaaacagaaatattagacaaacagttttaaatcctcaataaaaacaaacccaaacgccaccgaaatgttagaattatcagatggagactttaaaatcactatagtattttaaagaatccacagggaaagatttatacaatgggtaaagaaatgatgaattttaggagacagatgtagaaactgccattttaaaaagccaaacggaaatgctggaactgaaaaatacaatatcgttgacccttgaacaacaagggtttgaactgcatgggtccattgaatgtagatttttttcagtaaatatactggaaaattttgtacctttgtgacaatttgaaaaaactcgcaaacttcatagcttagaaacatcaaaataattaagaaacaattaggcatatcataaatgcataaaacatacgtagatactagcatactttatcatttactataaaatatacacaaatctattataaaaagttaaaatttattaaaactcacacacaaatacttataaacaatcataaaatacagtattaaatcataactgcgtaaaattagtcatagtacattctgtcctactataataattatgtagccacctcctgttactattgggtgagctcaagtgttgggagtatgggattaaaatgtcatgtaatactaatcattcccacgtaagcagttcgtcttctctttaggaaaaagtgatgtctcacggttcttgcggttgtcctgtttttgttttgtttgtttgtttattacagagttttgctctgtcgtccaggctggagtgcagtggcacgatctcagctcactgcaacctctgcctcccgggttcaagtgattatcctgcctcagcctcccaagtagctgggattagaggcatgcaccaccacgcctggctaatttttgtatttttagtagaaacgttctttggttcaagacggccaggctggtcttgaactcctgacctcaagtgatccacccccctcggcctcccaaagtgctgggattacaggtgtgccaccgcgcccaggatcttgtgtatttttaattgtgtttagtgcaattccataaagcctgaataacaccacgagacccatatagtgatgctggaagttttccctggagacagagaaaagccataacattacaggaaaaagttgaattgcttgatatgtgctatagattgaggtctgctgctgcagtttcctgccatttctgactgatgtttcatctcttaacagatgacacaaacttacataattgataaatacggtattgtactgtcagtgtattttctcttccttataattttcttaataacattttcttttctctggctcatgttattgtaagaatacagtatataatacatacaacatacaaaatatgtgtcagtcaactgtatatatgatcagtaaggcttctggttaacagtagtttattagtagttaaggtttaggggagtcaaaagttattcatggatttccaaatgtatgagggggtcagcacctctaacccacgcattgttcaagggtcagctgtatacgactttctggtaaaaagaaccaggagtccttggagagatggttgatcccagacagaggaaagagaacatacaagataaccctggaatactgtatgatgccagaaactaaagaagtcattaaaaaaaaaaatgaggacacatcaaaaaactcacagtaatcacgttaaaggatttccccatagccaagtctgggaaaatgtaaacagcaaagtaaataatgagaataatgaagaaagaataaaataaacatccaggagtcattactggatatgaataaagaaaataaacagtaaacgaataggaggagagggacagctcttacaaaattcaaaataacaaacataggagaaatgatgaaagttatcattaggcaaacagcccaatagtaattgttacagtcaaaactcatttgtggatgctaaaattagtaggcaaaactataatgagaaaaagatacttgcataatctcaaagtattaccataaatacttattatgttacttatattattataagatatgactacagttttaataagacaacacagttaaaaaaatgaaaaataatttgaataaaagacacgtaaggaccaataaagcacatgataagatgtttaacaccattaaccatcacagagcaaattgaaacgacttgagggagcacttcacagccgatagaatgcctaaaaccaagagactgacaattccaagtattaccaaggatgtggaacatctggaactctcatcgctgtagggagtgtaaatggcacaatcactctggaaagcagtttagcagtttcttataaagataaacagacagcaaatgactcagaaattccaattctaggtatttacccaaaataaagaacacatgtgttcacacaaagaacgaagaaccatatacaacacaactaactgttctctccttcttcttcttcttcttcttcttcctcttcctcttcctcttcctcttcttcttcttcttcttcttcttcttcttcttcttcttcttcttcttcttcttcttcttcttctttttttcggacccaggctgttgtgcagtggcatgatcatggctcactgcagcctcaacttcctgggctcaagtgatcctcccacctcagccccccaagtagctgagactacaggatgcaccacgatgcccggccaatattttgtattattttgtagagacagggttatatcatgtttcccaggctggtctcaaactcctgggctcaagtatcctcccaccttggcctcccaaagttctgggattacaggtgtgagccaccatacccaacaattgtggcttctttcatagcagcccaaaactagaaacaacccaaatgcccatcaatgcatgaatggataaactgtggtatatttatacagtgaaatactattagcaataaaaaggagcaaattactaatatatgaaacactatgaatgaatttccataacaagccagataacagaagccagaaataaggcatgaagctaggcatggtggctcatgcctgtaattctagcattttgggagtccaaggtgggtgaatcacttgagcccaagaattcgagaccagtctgggcaacacagcgagaccctgtctctacaaaaagtacaaaacttagccgcgtgtggtggcctgcacctgtaatcccagctacttggggggttgagtccaggaggttgaggctgcagtgaactgtgatcacaccactgcactctagcctgggtgacaaagtaacaccttgtctcaaaaaacataaaaaaagtaaatttcattgaagtacaaattacgggtaataaaatgcacacattttaagtatattgttcaataagttttgacaagtgcatacacttggataaccaataccccattcaagatatagagcatgcattttcattattctagaaagttatcctatgccctgtcccagacaaccaatcatctgatttctatcttgctagatttgcttttcctgttgtaggaaagttatgtcagtgaaatcaggtggtatgaatgtatgaatgcttgcttgcttgctttttttttttttttttttttgagacagggtctcactctgtcacccaggctggagtgcagtagtgcagtggtgcaatcacggctccctacagccttgacctcctaagtatattgaacaatatacttaaaatgtgtgcattttattacatgtaaattctatcttaaagaagtttattttattttatgtttttttgagacaaggtctgactctgtcacccaggctagagtgcagtggcatgatcacagctcactgcagcctcaatctcctaggcgcaggttatcttcccagctcagccccccaaggagctgggactacagatgaaggccaccacacccggctaagtttttgtacttttcgtagagacaaggtcttgctatgttgcccagactggtctcgaactcctgggctcaggtgatccattcctcttggcctcttaaagtgctgggattacagatgtgagccaccatgcccagactgaagttgattttaaaagcagaaatgagctactgatacttgaaacaacatgaataaattgcaaaataattactcctagtgaaataattcttactcaaaggagtatatattattccatttgtatgaagtcctagaagaggcaaaactaagtatcaaggaaagaggcaagtggaaggtttgtaggatgatggaaatcttctgtttcttcattgaagtcatcaaaattcatcaaagcgtatatttcaaatctgtgcattttattgcatgtaaattatatccaaatgtctaccagtagagaagaaacaagaaataacgaagtcttacatgggttcaaatgagacttgagagaaaagaatgggacacactcaggagaggtggcaatgagaaaacatgaccttgtgctcctcaatgacacagaggagcagaagtgacctttttacttaccacagggagcaccaatgctggcacgtttcctctgaatcatctccttctttcttaatcatcattagcaccagtggctaattaattgtctgtgaactgtgacgctctggagtcttgggagaattaacaagccatttctctccatgggatgggagtcccgggatccctccctccatcacttcaccacgttttcttctctatctccactaccattaaaagacaggttaacttactaggttgaagaggagaggttgtgggcaaagagcaaccttcagccttacaggtccagaagaaggatggtggtggggtatagtttgtgcctgactctagagccaacccacctgggttcaagtctcagctctggctatataattctgagctaattatttaacctatgttttagtttcttcatctgaaaataaatatagaatatagaaatattatccaggtcatacagaggttgtgaagtgctttgaaaggtgtggcagcagcattagaagtcaacattactacctgagccctaatccaccaccctttcaaaggtgcccaacactcctgactttgcttgtagatttcattgtgaggattaactagaggctcactcagtctagaagctcgttgtcagggagaagctccggcagcaggcaatggggagattgtgacatgattgaggaaaagttataagtttattcttctcctactgtccattaatgtccacatatcgtcaatggtagagctaccccaggagcaccagatttggaatcaaacaggactcagactccaggcctggtcttcatcggctatgtaaccttgggcaagctacttaacctctctgcgaccatttcttcttctgtaaaaggaagatgatattaactacctcaaagagttatgagaaccaggtattcaggaaatgtttagcatggtgcctggtgtataggaagcacacaacagatggtagctgccaaagtattaacgtggttttcactaatgaattggagaaaagaattgatatttcattcccttgtagcacctagtacacaactaggtctttggtgattaataaagaaataaatacatccgtgaatatgaaattaataggaagagagtaaagttgtactggacttttgtgggtgtccaagaaaaattaaaaagaccagaagaaagagagtgagaacaaatacacgttgtgaaacacagaacaagagagaacagaaagagagtcaaagaactatgtaaattgaagagactgaaaaatgacatagagtgaagcaatgaattaccaagagtataagagtgtaagagagggatgcagaaagtgtattagaatgatggttgacagataaataaggaggagttggctattttttaccaacacaaagggtgtaatgttataagacaatataggaatgattttgtaaaagtaataattgaaatagtcattgcgtcttcaggagtaggtagtaggtatgattagggaagggcacgcagaaggcttttaagatttaaacaatcttttgttaaaatattcaacaatattttaaaggaaaaatttttctcagagtaaaaagaatataggaggaaggaaacgaaaaaagagacaaatataaacaggttgaacaaataaaaagatgagatggggcttttaaacacacaaaaaagagacactgcaatgggtagatgctgccaacctatagcctctccagccacctccccatcaacttgcccagttcctgcctctcaactgccagagtggctgccaccgtccacccatatctgagttggccctgtgtgctgaaactctcttcaccttctcaaaaacacagtcccctcctccaggaagcattccctgattcactcaaccaccctactcattttctttacagatctatctctcacctctagccccctaccccaatatttttgccttatttgcctgcaatgtttcaagttttctgctgatgttgaatgtactacccagggtttttcaaagccatgagactactctttcttccagcccataagctcctccgccttgaatgaccacattgttcaataatttgaagtagactccttacttcagtgacttaggataggctactaaagaggataaagtcagacctgacatctaagtacaatatgtgactctcaactggatcctacgtggaaaaaaaaaaatcctacaaagaacattattgggacatagagaaaataagaatatggactgtgtgttacataacaatactgtatcaattttaagtttattgaatttaattgctgtacagtgttaattaagatcatcttgttgtagaatatgaatactaagacaataaggagaaagaggcatgatgtccacaagttattcccaagtgactcagagtaaaaatgaaaatacataaacatattgagtataatgatagtgaaaatgagtaaaaatactaaaaattgatgaatttgataaaggttatatagaagttcttggaactacacttgcaacttttctgtaagtttcaacttatttcaaaatcaaaggtttttaattgcatgtgaataaaattaaccgagcattttcaaaagcaaaattctacttacatgtcccaaactcaacatggtatgtttttactactatattttatcttacatgaaaaggagaggatattgaaatctatttcagctttctaacaccaaacatcaattcttcaggatttttttgcagttacagaaccagaaaataatctttctgactgacattatattttttcttatttttacatattacacataatggaaaatttaggcaggacatttcatttgcaggagaaatgtttgttcttagtttaataagtcataattttttttgaaagacctaaatcacctgactgatctttctagcagttgagtcatttcacatacagaagaaatctccacagtccacatttctatcactggtcaaatctcttgcaaaagtgtaaagtagatagaatgtgaatgatttgagaaaatttatgcccaccactagaaaacatgatgaattctctagtaatgtttacaattaggaaactcactgaacacacatttctttgtatttccttccacacataacaaagggaaaattcagtagtagcatagcgatcagaacataataggtacttaataaatttttgcaaaattaataaaaactaactagttagctgatctatgcttcacatcagacgttttgcattcaaccaggaagtcagaggcaccagtgtgaggctcaatccgttgttgagcacattaatggtttcctcactcccactagacaatgtttgatcagaaggaacaggggatgagaaggagctgcttgatggtgatgagactgggaaaggaacgctgggcgagcagagacaaaagagaaacactcacctactgggacctcacaaacacccaggctgagttttaataagacaggttgaatcacactggggtgacagcctcatccttccagatacagagaggaacaggccatggttaaccaaagctccgcaccaggctttctccttctgggcttctctgaacacccagcactggaaaggactctctttgtagttgtcttcacttcctacctcctaaccccggtggactcatcatcctgctgtctgtgctggaccccaggctccactctccaatgtactttttcctctccaacctctccttcttggacctctgtttcaccataagttgtgtccccgggatgctggtcaacctctgggagccaaagaagaccatcatcttactgggctgctctgtccagttcttcatcttcctgtccctggggaccactgagtgcatcctcctgacggtgatggcctttgaccgctacatggctatcttcaagcccctgcgccatgccaccatcgtccacctctgcctgtgctggcagctggcatctgtggcctgggtcattgggctggtagagtcagtggtccagacaccatccaccctgcgcctgcctttctgcccccatcagcaggtggatgattttgtctgtgaggtcccagctctaattcgactctcctgtgaagacacctcctacaatgagatccagatggctgttgccagtgtcttcatcttggctgtgcctcagcctcatccttgtctcttatggagccattgcctgggcagtgctaaggactaactgcaaaagggcagaggaaagcttttgggacctgctcctcccatctcactgtggtcaccctcttctacagctcagtcattgctgtctacctccagcccaaaaatccctatgcccaagagaggggcaagttctttggtctcttctatgcagtgggcactccttcacttaaccctctcatatacaccctgaggaacaaggaggtaaccagggcattcaggagattgctggcgaaggaaatggggctcatacaaagttgagggagagctgtttaatgtgctttctaaattaagaagaaattatttatccttttgtgaacaagtttgagctcccaagtatactacctttcatacacccatcacagtgtttacaatgggtcacagtatatgagtgtgtgtgagagagagaaagagacagagaaagactaagagtcaggtaagaggaggtaggtatctttaattaacatctaaagctcaaaaagattatcatacctgcccatttttaatatttaatttctatatttttattttcttttcaatttggtttttaactctcttctcccctacaggttctccaaatgcaccatgcctatttctggttatgtaacccctctccgattgttacattatcatcatcattttaccatcacttgtgattcttttttttttttttttttttttttgagatggagtctcactctgtcgcccaggctggagtgcagtggtgcgatcttggctccctgcaacctccgcctcctgggttcaagtgattcttctgccccagcttcctgagtagctgggactacaggcacatgccaccatgcccagctaattttttatttttagtagagacggggtttcaccatgttggccaggctggtctcgaactcctgacctcaggtgatccacccgcctcggcctcccaaagtgctgggattataggagtgagccacatcacccagccacttctgattctgacaatgtcttctttcctttgtcatcaggatggttcatctccacttgcttgaggtggactgacaggaagctgacactcagagaatttagtaatttcacccaagaacacacagcaatttgttagacctaaattgagatgcatatctgttaacttaccaagtgcatgctgttggttttacaccattataaatataccaacatcattaggatttatacccaaatgggttatcaggcagaaaactctatttttccagtcctagtaagttttctgatcatccagctttccagggatcacaacactaatctcctgccaaatcctgaaaatgtgctcccattcctggagatgattttcctttacctcttctcaacctctgcatgacagtgaccatgaggagttgtgagtctgctcttcagtggctacacagtgctaacagctgtcctgcatccattttctagtgcagttctgaaattctgaccaacctctactagccaggcacaaacatgaaatccaattgtaagtaataaagtgctgcaatggagcctggatggagcaagggcctcagaaaaaagggagcagcagtgtaagccccaacttctatgaaatcttatttcctttttcaagttgatctacattcattacattctcaaagcctcacatgaatggaatggagagtgtgatggaaaaatctgtttagaactgaaccattctctcctctttcctgtcaggaaagaggttatgctgtgataacaataccaatcctcagtgacttgaaacagcataggtttatttcttgctgctgctgcatgcccattgtcatccaaccagaggttctgccttgtcatcttcacccaaagatgtggactgacagaacacccaccatctcaaacactcctaggtgctgggaaaggaggaaataataagcatgacaaatggcaaactagcacttagtttccaatcggaagtggcataacactttgactcattggtcatttgccaaagcaaatctcatggctacatataacttcaaggtgaggggaaataaaccaatcatgtggcaggaaagggaaccagaaatatttggtggatgatatgaatgactactaactggctctttgcctccagtcttgaccgattgaaattgattatccatgttgaaccagagtaatcattccaaaatacaaatttgaatatgttactcccttagccaaaaataatatatagaatccccctgcaataaaatgtggagcccaaactcctagatcgggttcctgttttccagactttaccatccccacctcctaaggctcaaccacctagaatcctgcaagttcacacaactacctgcaagtgcaagtgtatgaaccacaccaggctctctgccacctttagcctttgaacgtgctcctccctctctttggaagactctcccctccagctcctctctaccaccaacaaaaagcacttcccatgaagtaacaggatctttttaattgtctacctctcaaagtacacagtaaggaaagtgagggtcagggttttggctcacttatccttatactcttagtgcctggcatagtatctggcacagtaggtatgtaatgaatatttattacagtcacccctcagtatccccagggaattagttccaggacacccctcagataccaaaatctgcagatgctgaagtcccaaagttgaccttgcagaactcacaaatacaaaaagtcggttctcacatccatgagtttagcatcctgagaatattgtattttcaattcatgtttgcttgtggatgcagaacctgtgggaatggaggatagactatatttacagaaagaaatcctagggcctgcgtcctcacgaaagcattggcctccagcgtgggctaacagcagagcagggcggagctggcccatggttgcagacctctgtgccagcctcccctagacaagagcgccgtgtcgaggagaagaaatcggctcaagctctgggcccatgatgcctgctccttccaaagactgtggcagattacgccaactgggatccggcggtcgcaaggtctagaggagtcaagaaagccatcaccaacgtcgttcagcaggaagtaaaatccctttgtgtcttggaagcctcccaggttcctgcagaagaagctgtttctggagctagtgagccctatgacatcatcgacagcagtaacttgaagaagagcagacatggaagagaaatctgcttttcactttatatttttgcctgtcttttaaatgttacagctgtgtgtgctttacatattcaaaataaattgtgtgtatgtgtgtgtgtgtgtgtaaattttaagcagttaataggttcaaggcagaagtggctacaagtttatgccccagtaagaatcagttccagtgctcttcattaattgccaggcaaaatagccatagtaatgtagtaactagaataaaatttaaattaggttagttataaacaccctatccattatcgactcccaaagctgcttcatccatgaatatttaatatgccacaaaactatcagagattgctaatatatcccataatataatatgaaaccaaaagatttttcaaaaagctaaacttgggagagactcatagcaaaatgacatgtaattctgaggtcatcactgagtatggtacttgagtctatcgccacatgtgaaaagcatctgaatataatccaaaaagctattgcagtcatgggctgcagaataatgcggtggccaagaggctgtaatattgtgatataataagatatacatatttggcctttgatcccagttcctggcacagagttcctaaggcccttgtaattccctgagcaataggggtgctaggagagtcttttgttctaatatttggtctttgaccaaatatgtcagttcctaacattgagctctaatcccttggaatttcctgggtaacaggagcatcttttgttctaatgaggtgaccccttgggggacccctgaatggggactctgactagaaggaccaagccatgattagaagtttgaaactttcagctctaccctcatcttccagaaaatcgagagtggctagacattgagttaataatcaactatatctatttgatgaagcctccacaaaaatccctgaactacagagctccgagaacttccaggctggtgcacacacagaaatgctgagagggcagcatgccccagaagctctgtaacccttcccacacaccttttcctgtacatctcttctattttgttgttcatttgtatcctttggaatatcctctataataaactggtaaattgaactaaagagctttcatgtattctgtgaactgctctaataaatcatcaaacccaaggaggggattgtgggaacccccagtagggttcccagtaggtcagaagttccagaagcttggacttgtgattggcatctgaagtggggagcagccttataggatcctttaacctgtgggatctcactgtatctccaggtgaataatgtcagaagtgaattgaattgaattataggacaccaagttggtgtccactgaagaatgtattggtcagtctggaagaaaaaccaacatgttggccgggcgtggtggctcagccctgtaatcccagcactttgggaggctgaggcgggcggatcacaaggtcaggagatcaagaccatcctggctaacaaggtgaaaccccgtctctactaaaaatacaaaaaatcagccaggcatggtggcagatgcctgtagtcccagctactcgggaggctgaggcaggagaatggcatgaacccaggaggcagagcttgcagtgagccgagatcgcgctactgcactccaacctgggcaacagagcaagacttccatctcaaaaaataataaaataaaacaaaacaaaataaaataaaataaaaacgaacatgttttggtgactagaagtgttgaatgttgagaatatagtaggagaaaatggtcagtttgggggttttctacaaatacacagagccctttcgcattgcgcagcatccaatttgaatcctggacctgcaaactcatgcccaggatatagtgccatatcaagggcagcatttgcatgtttctggcaggccggacgttcagtagctgcaggagttagatcagtgttggtgagtgaaagccatgctgttgaacacatacagacctgcatcctgccaccatagttactgccttcataagtccatttttaccagcactagggtggcctgtggagaagactgcttagtgtgaactggcctatagtcactgtttacttggtttagaagaggtttagagcctcttctattgtggatgctttctagtgggcattagcatgtaacacaaagatattcacaattttcccaatttcataaataaaaagatttcccattttcataaacctatccaagtgcctcttcctcaaatttcattgttcttcatcttctaaacctcctccttccaagcacttgaccaaccaaccaagccatttgccactgcccatgtattcacaaatattcttccattaggccattattctttctacacaaaatagataatcaggtgcactactcaaagctttgcccattgggaagatttacaatttctactgtcttccagaactactcttgagtgtggctataatgcagcagcagtccattttcagctcacaccaatgtgttgagcagatacatccatgaaccaaggtcatcttatttttcctccattaaccaatcataaagtacccctccccccccatgacagattaaagatggctgcaaactatcggacaatcatcccatcaggagggctatctatttcccctccccttgaatctgtgctagtctatgactgttttgacaaaaacagcgtggcagaagtgacaccatgccagctctggggccagcctgtaagagaactggctgttcctccttgctatcctggagtcctgaatttccaagtaaaaagtctatcatgctgggcagaccatgtagaaaggccctgagatagcatgaagacagagaaaatgagcccaaacttacagtgaacccaccaaggtgccaggcatgtgagtgaagctgtctcggaccctctagagcagtccatctgccagctgaatacttccaagggatcccagctgatgcaacatggaatataaggaaacccagccaatttcgttccaaattcttggcccacaacatgtgagatacaataaggtttgtgttcatttaagccattaaatttggggagactttgttatgcagcaataaataactagaacactcccatgagccactggtatgagcaagttgggaagtaccaaggccacagcgtggaggacatgggaatctgggccccccacttcagcaccttgcatttaccctccagttctgcccatgactgatgcaggatatacgacttctctcttacaactgatgatgttgcaaccactagacctcatcacttgattgatttgacaggacccagctcatgatggacagttgtagcctaatagccatttgatgtctcatgatcaggagctctgtctctagtaaggcccaagagcaagctaggacttgtttcctaatggggtttactttcctgcagcagacagcatagatttgatgaagaaccccagggatctatgttgtgattttcctttcaaggcttgcccaaaatgccacactgtatcttttcccaccactgatacctttagtgccccagagtctattgagtcacatgaccaaagcactaccacacggctgatatgacagcttagaacagctgcggaccccaggtctgctctgggcttcagtcagtcgctagtaaactgttccatgtggtattcccatgagtgtggaatatgtttcctctagatcctaaataggacaaccaagcattctctaccctggagaagaggaaggagaagaccaagattcactgctggaagaagaaaacagcctatgaggctacagaaacaggcagaaaagaacgtggagaagaaaactgacaaatacacacagttctcctcaagacctatggactcctggtctgagcctaataaagactgtttattccaaaaaacacctctgtattataaattcttctgtgtaatagtgtgttactgtgcatctctttccaattctgcattactggtgttaagtgtgaaatgcaataatgtgttcttactttagagggatgtcctggcacaaagtctaaaaacttcaaagatgtggaggatgctgaatcttcacagggtgtatttcccactctctggagtgcatttgtcttacgagtgccgccaatatgcttgccctcatggctcattctgtttggttaataagatattgttgatacagtggaacgatgtcatgttttgtggaatgtccagaaggtccacgtccagtggtgtgctgcatgcagctagctcatactgcctcatggagccaactgttaaattttcagaaattgtgcaaaccagttgttaaacatgactattattttaaaataagttattttaaggcataggtaacaaatccctaagctcttcattttctaggtatttaactatcttatcatattttccatactcttctggttatttatatctgttatgtctatataataaagatactaaataatgttgtctgtataataaaaatattctggattggtgatgagcaacaatcaccatctttcgtttgagtctcatggccatgagaccaaccccatgcactgctctgagacctgccagccactcccattcctggggtgcggtcctcctggttcagaagtgattttccattaggctatcttttaatttaaacatgaactctgctgtgcccatcactgtctgtgtgcagtcacaggtagagggagagccttcagatggcaccctcagcacttcccaaccctttccttccctctaggccagaaggtggtggtcgtacaatgcgagagcatcaacatttctggcaagttctacagaaacaagttgaagtacctgggctttctccgcaagcggatgaacaccttctggaggccctgccatttctcggccctagccgcatcttctggtggatggtgcaaggcccactgccccacaagactcaccaaggccaggccgccctcaaccacctcaaggtgtctgacggcattccaccgccccatgacaagaaaaagctttggtggttcctgctgccctcaagcttgtgtgtctgaagcctacaagaaaatttgtccgcctggacaccgagcttatgaagttagctggaagtaccaggcagtgacagccaccctgaagaagaggaaggagaaggccaagatccactaccagaagaagaaacagcttatgaggctacagaaataggtggaaaagaacatgaaaaagaaaactgacaaatacacacaggtctcctcaagatccatggacttctggtctgagcctaataaagactgtttgtttattcctcaaaaacaaacaaacaaaaaaaaaccctctgtattataaattattctgtgtaatggtgtgttaccatacatttctctacaactctgcattttcagtaatctcacattgacagtttaaaattggccatggtgagaatatttacactgcagaaatcagcaaatgatgtaaatcaaggcttttttgcctggacttgcagcacatccatgtcccattggaccctattatgacgggagagttttaacatggtactgaagcaaaaatgtaaatgtaaatgtacacttatatccatacctgtaaattcaaactgcctttggtctttcttcctgatagtatttgaaaagaacacattcagccaggcacggtggctcacgtctgtaatcccagcattttgggaggctgaggcaggcagatcacgaggtcaggagttaaagaccagtctgatcaatatggtgaaaccctgtctctactaaaaatacaaaaattagccaggcgtggtggcattcgcctgtagtcccagctactcaggaggctgaggcaggagaatcgctcgaacccgggagggggaggttgcagtgagccaagatcatgccattgcactccagcctgggcaacagtgagattccatctcaaaaagaaaagaaaagaacacattattcaccagattaatagccatataacatggacctgaaaccgtgctaatcaggcacaacagctgtaattacagctatttcttggttgagtttgtgctagtctggtcatctttcaagttgcatctgatatttgtagtgaccagactggtgaattaaatgtgaaatatgatagaaacaaacccccgcaccctttaaaggtggcctcaatcagccatttcccttgaattgtgatattgttcttgattcactgtctttgcggtaagaggtgtagattcagggcttccacttcaatctgtagctcgtactccacagactaaagaactatgtggggattctgccaatggccaagcatgtgcattccagttacagatttagagactgcagaaatgactactgggtagatccatggacctagtacatgccatttattagctgatctcataggctccctttctaatggaagagaagcataacgattcagttatatgaagattggctaaatgttctaagtactctccaaacccagagctttataattctctgttactacagtgtgctccatctcagaataactaaatagaaaaggaggaagctgagaactttaaaaactgaggtcctgaatagatgaatcataagcctgagaggactatcaggatgcccgggactcactggaggtgggagtagagacactgtcctttttcttcctgttgacagaaagaagcaatgagtgacctcttttacctaccacagtgatgactattgttggcatatttcctatagatattcccctgccccttttaccataatttgtggctaatgaattgtctgtgggctatggaccctagagtctcagcagaattaatgagctctttccctccgtgggatccctctaccaccataccatgtcaacatttctacctccaatgccactaaaacagaggcacacctctgcctagactgagggggaaaattgttggcaaagaactcaatggcaaagaactcgatggcaaagaactcgatggcaaagaactcaatggcaaagttctgaccttggcttcatcctccctgcagagatttggtgggctttggttggtgcaaaccctctacagttagcagatttgggttcaaacatcagctctggtgcttactaactatactgccttgggaaagttatttatatttctttgtttcaacttcttcatattggaaggaagagaataatatgtagagttgtgaaggataatcagcagtgtagagtaaatgtttaataaacaacttggttggtggcagatggggagagccctaatttgtagtgtttgccaattttcatagtgtaaatattcctgccatggctgtctcaagccactgatggtttaataactgtctcacaaaattcctaaaaatttactaatcaagagataatctgagccagctccagctcatcacacacatgtgtgcttagaaaagtgccagatggtcagcattagcaatccctattgtgaccagagatgcagttgcccattcaaggatgcccattcctttttatttttttgtttcttcctgatgtacaagtggaggctgggcaccagttaagagctctgtcatggggaattgctggtaccagaagagatttttatttgattgaaggtaagcagaacctttgctctttggctgtgagatatcagtttccgcctatcctcaacactggaggaccagatttggagttaaacttactctaaaatcctagtcctagcacttattgactaggtaaccttctacaagtctcttgtcccgtctgtgactgttcactttttggtaaaattgggataattttatctctttgtagggtcactgtgagaaccagatgttcagggagttgtttatcaccatgctttgatggtagctactaacagcaagggtagctcatggtcactagactatcataaacccctttcaaaggacctcccaactccttccccagctcctaacacaatgctggcactttggggctcaagaaatgaataaatgcgtagaccaatgcatgaatatttcagaaggaaaaggagtaggagaaaaataatgagagtggaaaagacagagaacaaagagggaaagggaaacagtcactaagaaaggtgtaatctaaagagattcagcgatatagcagagaaaggaaaggaatgaaatgccaagataatgacaaagttagaaatgtagaaaattaattaggatgacacatgatggataaataagaaacaattggctattgtttaaggttacatgcaaagaattttatattacaaagaaaacaaaggagggggcggcagccaatgagcatgaggtttcttttgggagtaatgaaatattctggaagtaaatggtgttggttgcacaacttgtgaatatactttaaaccactaaattacacacttcaaaagggcgaattttatggtacgttaaatacatctcaaaaaatgaaagcgaaggcataattaaaaatttagaggccaggcacagtgactcatgcctgtaatcccagcactttgggaggccgaggcaggcagatcacctgaggtcaggagtctgagaccagcctggccaacatggcgaaaccccgtctctactaaaaatacaaaaattagctaggcatggtcttgagtgcctgtaatccccgctacttgggaggctgaggcaggagaatagcttgagcccaggaggtggaagttgcagtgagcagagatcgtgccattgcactccagcctgggctataaaacgtgactctaaaaaaaaaaaaaaaaaaaaaaaattagaatggtggtgacatcttgaggggtgacaaattgagaaaattgagagatcagggaggggcacacagaagcttctaagatacttgaaacatttgctcagttccttaacctagttgtttaaatatgtaacaatattttgaaaattaaaaatatattttaagtgagaaaagaataatgggaaaaacaggaagaagacagagacaatggcagagagtcctggcaaaaagggagatgtgatagagcttaatacaagatggggaccctgtaagaggaagacattcctgccatcctctgagctccatggcacgtttgtggtgtggcccaccatctcatctcctcccctcatggccttcctaaggtcctgtaagaccctgagtccttgtctctgacctgccagagtggcttcagtctcccacccccagccctcaactgaccttctatgccccaatacatctctattttaaggaaaaagtccagtcacctcctctaggaagctttccctgatatacccaaccaaattggtcagtcatcctacagaacctttactctcattcacccagtacattggtgttactggcctttaaattttggactctctttttggtggtgtctgaaagactacaagatttagggagagtgattcttggagtctttcgataatgttcctgtgaaccctggtgattttaacatgcttgtggccactcttgcctcctacttgtaagctactcatggcaaggacgaagcatgtggaccaatttccacccctccctgaaagtcagttggttcagaaacttaggttgctaaaaaggccagggcaaccaacctgatctctctataagtagggatatcttaaaacaaaacaaaatctctctcatagataaaacactgtctctgataagcttacttgcaaatgaaaaaatacaaaataaatggaatgtacagagttctataaaattcattcaaccaatagagcaataattgagcctacagagacaacttatcagaaaattcattcaatataccttacgagatcatccaatagataagagacaactctagaacagcattcagaacatagtggcactcaataaatttcccctgaatgaatgaattaatgaattagtgcatattttaatcagcctcctttgccctcacccaggaagtcagaggcaccagtgtgagtatccatctgctgtccagtacattcatggattcctcactctcactagacaatgtttgaccaggaagaacagggaatgagaaggagctgctggatggtgatgagccttggaaagggaggctgggcgagcagagacagaagagaaacacctacctgctgtgacctcacaaacacccaggctgagttttgataagacaggttgaatcacactggggtgacagcctcatccctccaggtacaaacaagaacaggccatggttaaccaaagctccacaccgggcttcctccttctgggcttctctgaacacccagggctggaaaggactctcttcgtggttgtcttcacttcctacctcctaaccctagtgggcaacacactcatcatcctgctgtctgcgctggaccccaagctccactctccaatgtactttttcctctccaacctctccttcttggacctctgtttcaccacgagttgtgttccccaaatgctggtcaacctctggggcccaaagaagaccatcagcttcctggactgctctgtccagatcttcatcttcctgtccctggggacaactgagtgcatcctcttgacagtgatggcttttgatcgctacgtggctgtctgccagcccctccactatgccaccatcatccacccccgcctgtgctggcagctggcatctgtggcctgggtcattgggctagtggagtcagtggtccagacaccatccaccctgcacctgcccttctgccccgatcggcaggtggatgattttgtctgtgaggtcccagctctaattcgactctcctgtgaagacacctcctacaatgagatccaggtggctgttgccagtgtcttcatcttggttgtgcctctcagcctcatccttgtctcttacggagccattacctgggcagtgctgaggattaactctgcaaaagggcggaggaaagcttttgggacctgctcctcccatctcactgtggtcaccctcttctacagctcagtcattgctgtctacctccagcccaaaaatccctatgcccaagagaggggcaagttctttggtctcttctatgcagtgggcactccttcacttaaccctctcatatacaccctgaggaacaaggaggtaaccagggcattcaggagattgctggggaaggaaatggggctcacacaaagctgagggagagctgcttaatgtgctttaaaagagaggagattctatgtgcttttatcagaaagtttgagttccctgcccctctgccttcttcacacccattacattgtgggaatggatgaaagccacatgtctgtgtgtgtgcatgtatgtgtgcaagagacagcgactgaaatgtagtaaagggaggtatctttatgcgaaaaattataggcatcaagtatattttatatttttttctactttaagtcttcgcctccatagtcatgttcctacctttatcacttccatttttaattcccctcccttgccatatccccactattccttcacctccaattctaattcctaccatatcttctttgcttctccctcatgtttttcccacttcactatatgtctgttttgtattctcattctattttattcctcaaataacagcaaaagagaaggggaagctgaagcccagctaagttcggaaactcacccaagaacacacagtgtccacagcatcagaactaaaatccaggccccataattttcagtcaggcaactctcaaatacacactgttgctttcacaccataatcaaatatcccagtatttcaggcttgagccttacaaaggaaacttagcttcttcagtcctatttcttctcttacaatgcccacaaatcgcaggtaaaggagcagccaaaaagacacaaaaatatcttcatgtttaggctggcacattgtggaccttggtgtcatctaccggccaaatatggtattgcatgtgacatcccagacttctgctccagggtcatccgaactgtactttgctcaaagacatagatatggttatgatactataagcatttatgtaattgttatgttaacccaagtaacacttaaagtacagatgctccttgacttataatgatgttacctcccaaaaaacctatcatatactgaaaatattgtaagttgaatatgcatttcatacacctaacctaccaaacatcatagcttagcctagcctaccttaaacatactcagaacacttacattagcctacagttcagcaaaatcctcaatacaaagtctattttataataaagttttgaatatctcatgtaatttactgaatactgtactaaaagtgaaaaaacagaatggttatattggtactcaaagtacggtttctactgaatgtatctcttttgcattattataaagtcaaaaaatggtcaaagtcaggaaccccctgcaatttacacatattgacttatttaacccttataacaacactatgaagcagataatattattatcctttttcagaggtaaaaactaaaacacagaatttatgttaccacttgcaaatgtgcaagacaggatttgaacccaggaaaactggctccagactccttgctcttaaccttgccttttggtaaaaataatgcctcccaggcccaggtgaaaagcttcaacttctcaacaagctttgaggaaatcatttcaatctaaaactatatctaaatgatcccccagccgaaggggtttcacttccttaaaataagagtttttcaaatacttcaaagcataagaaacaacagaacaataaaacttttggaaaaagttgtgttacagttcattgtgtgtgtgtttctggcttagttcacccactagatttcaggctctcagaaggcaaggaccagaattttgcataaaattggcacccagttttataaatgtataagtgaatgaatgaatgaatgaatgaatcttactctccaaagagaatatataaaaggttctggggttccaatcccacatacgctgtctcccagcttttccctggcaagggcagcaataccaaattcccttttgagtacacgccgataaaataagaaaaaggaaaatcttagttttatttctagttccaacataaaatgattttgattcaacatttatcctggcatcagcacagaacagcaacattaattctattataatcctaatctttatcctagccatccttgtgttaatcttattgtctccttgacctcgttattagagcatattctaatcttaatgtagagcccccattttatatttaataatcctaatcagtcaggcgcagtggctcacacctataatcccagcactttaggaggccaaggcgggcggatcacgaggtcaggagttcgagaccagcctgaccaacatggtgaaaccctgtctctactaaaaatacaaaaaaaaaactagcctggcgtggtggcgtgctcctgtaatcccagctacttaggaggctaaggcaggagaacctgggaggcggaggttgcagtgagccgagatcatgccactgcactccagccagggcgacacagtgagactctatctcaaataatcataatcataatcataatctcagccctacaggtaaggctaagcttaattccacttttcaaatcactgtagtaagacctttttttcatgaccccctctatctgctttctcttactggcacctagaaatgtctacacttttctcctgtttatcatctccctacagccagaggctataatgtttgtatacagtaaaatcgtttctagactgactctaggggaaatgcaacagagaattaaataaagcagtctaaaagaatctgctttgttgaataaatggtttaacataggacttaggactaacatctcttatcctaaattcattgtttccatgtgacagtcatctattggatactctgtgagaaaatccaatataaagttactcagtcacaacccccacaatgtccagtgaaaatagggatggtcaggcacatagtgccagcatacatgacagttacacaactgaattggagcaaataagagtctacaggaatacagaattaaagaataatgtgtgtgagtgcttggagcggcagtgatcatggaagcctcttagaggtttgaaccacagaagagtaaacaaaataagaagtatttgctgactgtgtagaaatgagatgatgcaaagaccccctttttaggggcttggggactcctaagcatggaaataaagcaaaatcctgtgtttcttcaaggaaaattccaggcacctagctggctctgagaaataagtagcaacttgaaaagcaacaaggtaatagcagcctaagacaatagccaaggaagttaagcgttctgaataggtttgctttcctcatagaaactaaagataacctcttaacatatgtctctgcgttgtctctcagaaactcggaaccccaccaaatgaatctgctggcatagacctcagaggacaggaaaatgactgaactttataaccatcatcctttgttctaagtttcttcctgaggagcttggagaaagtaacaccttctaggcagttaacatttttctactggaccccaaatttttaaacaaaggttctcttccttaactaattgcaaatttggggtttttttgtttttgtttgagacaggcttttgctctgttacttaggccagaatgcagttgcagtcgtagctcactgcagcttaaccacccaggctcaagcaattctcctgcctcagcctctaattaaaaaaaattttgtgtgtgtagatacagagtcttgttatgtttcgcaggctggtctcaaactcttggccttaagggatcctctctccttggcctcccaaagtgctgggattacaagcatgacccacacctggccagaaaaatctttgaatctacctataacctgtaagtccctgattcaagatatcccacccttttagatcaaaaccaatgtggaggccgggcacggtggctcacggctgtaatcccagccctttgggaagcaatgtgggcggatcatgaggtcagatcaagaccatcctggctaacacggtgaaaccccatctctacaaaaaatacaaaaaaaaaaattagccaggcgtggtggtgggtgcctatagtcctagctactcgggaggctgaggcaggagaatggcatgatcctgggaggcagagcttgcagtgagccaagatcacacagctgcactccagcctgggcaaccgagcaagactccatctcaaaaaaaaatgtggaacctctatgcactgatttccaatgttccttgtagcttctgcttttctgaaatttacccctgcctttttttgtttcctgttttttgagacagggtcttgccgtgttgtccaggctggagtgcagtggcataatcatggctcagtgcagcctcaacctcctggattcaagggatcctctcacctcagccttctgagtggctgggagtacaggcatatgccaccatatttggctaatttttttatttcttgtagagttggggtctcactttgttgcccaggctgttcttgaactcctaggttcaagtgatcttcctgcctcagcctctcaaagtgctgggattacaggtgtgagccactgcacactgccttacccctgcctttaaaaacccatgttacaatagttagtcagacacgagcagggcaggaaagggcctccttccccaccaggaatgtcaggcaaccatcaggtgataggcggttgttaagctgtctctctaaaataatcattggtcacagcctgtgccagggaaaaacagtctcccaataaatagaaaaacctgaaactaagatctcaggagttgggcaagtgggctcatgcatgggcactaagggagaaatgacagcatttaactggtttataaccttataggaacactccctggtaagggaagaatgcctcaagtcagcatgcatactactccagtaaacataccgtgcatgcagcccctcccaagcactagcaggccactgtacatgcagacagcccaccccaagggaagattcaggggagaagggaccctggaaccctgccaacatataaaaccctaagtcaaggtcaaaaccacgcacttgatctctcaagttgcctgcttggcccccttccaagttggctttactttattttgttcctgctgtaaagctttttaataaacttttactcctgttctaaaatttgcttcggtctcttactctgctttatgcccctcagtcagattctttcttctgaggaggcaaaaattgaggttgctgcagacctgtacagattcgcagctgctaacatattttcatgccatgtaactctgatacattctgccgctaatacccttgcctgcaagacatcagggaggccaggacttgagtgtttagctgcctggtcctccctgcgtagtgtcctgcaacaaatgcctttctttctattggtgcaatccttggtgtaagtatctggttttattgcaccaggcaagcagaccccagtttggttctataacagaaaaggctaaagacaaaaataagcatgttgtgcattaagatagggagatgtgggggaaggagttacaccgaggagcaaaatgattaagcaggaaggtagagattatttcagaaagatacagaagctactgaattgaatacaaccagaaaaaaaaaaaaaaaaaaggatcccttacagatgtttcaaacctacatgatttaggtctcctgagggcaggcacttaactattcattctaacatgacatgtgagttggaagccttaaaggaacattattcaagaacctcgtctctactaaaaatatgaagtctctaataaaaattaaaaagtctctactaaaaatacaaataataataataataataatagccagggctggtggcaggtgcctgtaaaccccttgcttgggaagctgaggtaggagaaccacttgaacccaggaggcggaggtttcggtgaaccgagatcacgccactgcattccagcctgggagttagagtgagactccatctcaaaaaaataataataaaataaaataaacctcaaacgtctgaagggctcaccgaatcatgaatagatgcttatgtgtagggcccagccctgtcttatccttctatctcccagggaaggggaaaccttctggctcctcctatgcagaattaatcgctcacccttgaagggtaccagtatatgccacctcaaactatctttagcatgtggattattttgagctaacaattgaaaatcatcagactagtgaatgctgtaaaacaggatacaagttttccttttgtaaataaattcacatctgtaaaggtacaactcttactaatggagaagacatcagtttaaatctacataacaaaccttttctatctgtaaaggtacaactctactaatggagaagacagtttaaatccacataacaaaccttactaaaccactttgttccatattttcctggtcactttcccataacttgcctgcccatctaccactcacccagaagccccaaactccttttcctttacctagccaagatgttatacagttgctaagaacaacacgatttgaactccatggattcactcacacatgatttttttcagtaagtatattgaaaatttttggagatttgtgacaatttgaaaaaactcacaaaccacatagcttagaagcactggaaaaattaatgggccaggtgctgtggcacatgcctgtaatctcagaactttgggaggccaagatggatgcattgcttgagctcaggagttggagaccagcctgggtaacatggggaaaccccatctctgcaaaaaaaaaaaaaattaactgggcatggtggcacgcacctgtagtcccagttactagggaggctgaggtgggaggatctcttgagcccaggtggttgaggctgcagtgagctgtgattgcaccacctcactccagcctcaattaaaaaaataaatagggctgggcacggtggctcacgcctgtaatcccagcactttgggaggccgaggcaggtgaatcacgaggtcaggcaatcgagaccatcctggctaacacggtgaaaccccgtctctacttaaaaaatacaaaaaattagccaggcgtggtggcacacacctgtgatctcagctacttgggaggctgaggcaggagaaacgcttaaactcaggaggcggaggttgcagtgagccgagatggtgccactgcactccaacctgggcgacaaagactccatctcaaataaataaataaataaataagagaaaagtatgtcatgtgtaaaccaaaaataaaattctaagccccctaactgacaggaagaaaggtaagacatgccaatgataccctccttcctctggagtttagggacaactgaccagcattaacattacaatagagatcataagactgacaaaagattctctgtagcaataaaatagtcaactccaacctgactctgatacagcatcacaccacagatagcaggccctgaaggaaatcaaagtattttaccccaaaatatacttatttgacattttgaaatgactctgcaaagccatttcttgtcatggggatttgcattttgtagagaatccccttccccttccaggtctttttctgatccaggagggattttactaatgagtctgacatcttttaaggtgcgataagaaacatttaccatctattctttctgaggcctggaagcttcatctacgtaacaagaatctttgcttccacaaacatctcccccaacgccacctccacgcccccttaactcaagcatttctttctgctgacttcaactctttaggcagggcttaactttttcaaccaattggcaatcagaaaatctgaatccccctatgacctgtgagctcccttgcttcgagatgtcccgcctttctgagctgaaccaatatataccttacatgtattgatttatgtctttgtcagcaacttctggctccctaaaatgtatgaaaccaagctgtaacccaaccaccttgggcacatgttctcaggaactcctcagaatggctcagaataaacctcttcaaatattttacaaattttacttttttcatcaacaaataaatgtataaaatatatgtagatactaccaaaaaatatacacaaatctactataaaaaccaaaaatttggccaggcacttagggaggctaggtgggcagattgcttgaatccaggagttcatgaccaatccgagcaatatggtaaaaccccatctctactaaaaatacaaaaaatttgtccggcatggtggcatgtatctgcagtcccagctacccaggaggctgaggtaggaggatcacctgagcctaggaggttgaggctgaagtgagccaagatcacgccactgcactccagcctgggcaacagagtgagaccatgtctcaaaaaataaataaaatttatcaaaacttacgcacacacttacagaccatacataagccactcaaagtcaagagaaagcttaacaaaagatgcagaattaaatcataacggcataaaattaactgtagtgtatactgttctactgtaatttgatagccacctcctcttactattgcaaagagctcaactgttgcaagtatctgcctaaaatgccaagtgacactaatcatctctgcatgagcagttcatctatccagtaaattgtgtatagcagtaaagagtggtctctcaagattcttgcatatatttcatcatgtctagagcaatactgtgaaccttaaataacaccatagggcccatatgaagtgccaacagtgatgctggaagttctcccaagaagcaaagtcatgactctataaaaagttgaattgcttgatatacaccatagatcaaggtctgttgctggggttgctgccatttcagacagacgattcatcatgtaaatgatgtaaacttaaggcatcaataaatacagtatagtaccctatatgtattttccttacaattttcttgataacatttccttttctctagcttactttattataagaatacatatataagatgtatagcatacaaaatatgtgttgatcaactgtttacactactagtaaggctttcagtcaacagtaagctattagtagctaagtttggagagagtcaacagttatgtgcagattttcgtttgtgtgtggggtcagtaaccctaaaccccaagttgttcaaggggcaactatatgagctccaaattcttttttttttttttttgagtcagagtctcgctctgtcaaccaggatggagtgcaatggcgcgatctctgctcactgcaacctccgcctcccaggttcaagcaattctcctgccttaccctaccgagtagctggaattacaggtgcctgccaccacacccggctaatttttgtatttttagtagagacagggtttcaccatgttgcccaggctggtgtcaaactcttgacctgaagtgatcccccagcttcagcctcccaaagtgctggcattacaggcatgagccaccacacccagccatgagcccaaattctaactgcccctttgcattgttcaccactgggtactcccatgtgtacatgcatgaagcaaatgttaataaacttctatttgtttttctctcattaatctgtcttatgccactctaatttacacagccacggctggagaacctaagacaggaagaggaaaaggattttctttcctacactccctacacacacctggggaatgcactctgcaggccacatgacgttgcttctgcatctgtctccctagctttgctgcatcagtcccagtgtccagcccacacaggcctcagtacgtgtccctatcacagctgctgctggtgctgaactcaccttccaggagagtctccagcatatccttccacactccagggagccatgtaagtggatgccatactggttaaatattttgagtagcatcccatttgagggaagctgtcacttaacatgaacccaccataaggtggctaatgaatagcacctttctgcctgccttcaagtgacagcctcccttaacatgaagcctaccttttggtaagcttcatgtcaagtgatagcttccctcaagggcaaagtcacagaattatctgtttcaaaagcctgagtggataaacaaactgttgcctatccagggtgtcctaaaactaccaaggactgtgggaggagcaattggcaggaccatcttcaacacttcccattttctgctggggtgagatcacagctggcccccaagcatccagaggaatccagggcctggtaagaggctgtatgacagcaaatatacaaggctagggtgctcagctcagagggcggacaaagaacatgttaaagtgaagtgaacactggctttgcagcaggcagaccagatgcagcagactgcttttaccaaagcagcctgcaacacacatttgtcccattccacatgttctctttacagtgtgacttacgctcatcccaccaacaggtgaagtgtttcctctcctgaacctaggcatggccttgtgactgcttggaccagtggaatatctcagaagtgatgctacgtgactttcaaggctttgtcagggaaaaaaaaaatacagcttaaacctggctgactctctacaactgcctccacttgcctttggaactgtcattaggtcatgaggaataccaggccacatggaaaggtcatgtgtaggggtctcagctgacagccaatacctcctttagatgctgagtgaaggatcttttggacaacaaccctcagacttcagatcttccagatgctgtggagcagggtgaaccctccccactgtaccctatctgaatttctagcccacaaaaaccatgatggataataaatgattattgttgtctgaagccatttagggtaacaggttttgtggcaatagataataatatatgcagtttgaatactggctttgctccttagttttgtgaccccagaaaatgaacacacagtccccttgcttttagatttgtccttcacaccagagctaatggctgtgagatgcccaacactcctggttgctctcttaagtgatctcgtttgtttttctgcttactggtcatcttcccacgtcgagaaggtacaacgcttgaaagccatcttactcaccattttgcctcagtgccaaaaaaagcacctgccacagcaactcaccatcaacacttgttgaagatcacctaactaatgtagcagccaagtgcacacaaagtgctctctactggtagacaaccaacaggagggcagggaggcaacaggctaagtcagggaaaagcaggggacatggaagcctgcaggcagtctacattctaggacattccagagttagaaagtgatctgaaccctacccaaaggcaggtctgaaaggcaaagcctgcctcacagtgcacagggagcaagtcctcccagaactgccaagcggtagcctctccacctggcaacacatctcctttgcaccccttggggtacaattatatattaattatatatcattgtgtgtgtgtatatgtatatatgtgtgtgtgtatgtgtgtgtatatctcattgtaattatatataatgtactaataattagtattagtgctaatcaatagcaccattcaccctgaaaagacactttcagaaatgaatacatgaagtctcattgtagataagcattgacagatgaacatttgcaactgatcttaatcatcaggaacattaactgtgaactcaaataagtagttatctcaaaattgtttttcttattagtaggaggcctgtatgaaaaatagtgctcagtcatgttttaaatttggccagtaaaaatcttacaagttctcttctaagtacctttttaatattctcaatctcactccttcccacccctttgcactgggcactctgctagccgcaccgtttggctctcgactcctgcactcctgctagcagagtgtctggcttacctttggccacagtagaacttttcaccctttgtttataatttacagcccacttaagtgcaatgcaagtttgagatgataatttgggtcttttaggttctacccagggctgttctatagctcctgctactgttgtttcttttttttttttctttttttttttttttgagacagtctcactctgtcgcccaggctggagtgcagtggcacaaactcactgcaaccttcatctcctgggttcaagcaattatctgcctcagcctcccgagtagctgagattacaggcacccaccatcacgcccagctaatttttgtatttttagtagagacagggtttcgccatcttggccaggctggtcttgaactcctgacctcgtgatccacccacctcagcctcccaaagtgctgggattacaggcgtgagccaccacacccagcctcctgctgctgttctgatgccaactattcattttccaaactgcaggcttatctactccatagacttcttctcttttcctagcggatatttcactgtgggaagaagagagactcaaattaagtccaactggtccaaggtggataatcacagtggaaagtttttcaagtactggtctaagattcaaccagcccatgctttagtggaagttcagaaattggctcttaacaggtcagtgaatgacagggcccatccaacccttgcagctgtcttacaaaaatctgagaatcactttaaaaatcagtgccaaaataaaagaaaatttgagcttcaaaaaagcactctccaagatgacacaaaaaatgtttaaagtctcaggcaaatgtttttgcccttgtccattcaagattttttttcagtttgatagcaaattatttccaagatgctcagagttcctaaacaaagatgtttaaggttggaagcactcagcagccatctcatccattaccttctagcagtcatcattcttttactcttcttagttcctgggaaggagcgtccctagaggggatgcttaggcacttgctccaggctcccaatacatgcccactactgtcaaggaactcattaaacagcagggacagaggctaacattcacgcaacatataccatggcccaagggccaacctaggcacctgaatgcacaatttataatagtctttgtacccaacctatggaggaatgtattactgttattctcattttcataaatgaggacatggggaatagagactaagaaaatgtttgcatgtggttggatctgataccctggcagtctgactccagagcccacacttttaaccagtagtgtcctcactcactaatctcagacttaatcatgtcctgcttcattctgctaagccctcaatggatcaataaaacacctcttttcaccctccgctttaatgccttttcatgaacttggagtcctctgagcctcccttcttggattgaagcccattctgttcacaggaagactgcaaggtgccgagtcacactgttcactggtttattgagattcggggagatccttccccaagagacaccacagtgtgaaagggacaccacctcccaccccataggtccatctgtctatcccaacagtcaagggtgccttcctttggtcaggattctcatcaactatccactggaagcagctctccaaacctgcccccacttatttttccttaattcccctcaaaaaaacacaaaacaaaagggagcagtcttgggagaagatgattgtgagtgtagactgagggtagtacatgaatgcaatggagatggggggaatctgagcagaaatggagattctgtgacaaggagagggtgtggatggccccaccaaacatgaattggggaaaagtgcataacaatgtgcagggtagggtacatatggctctgtcagaagaataccatgatttaagggaagaaagtacacaaggtacatggagggtacacagggaaagtacatggataaacatggacgtgtgcaaataggaaagacatgactcagcatgctagacaaattgcacatgcctacccaaacacgctcaagggcagacccatgaccatgagaggggcacacgtagctgtgaatgcagggcacccgagagcacatgtgactgaacatgaagaaagcatacgggaaaagcgtgtgtacacatgagcatgttcagtgggcacacgcaggagaggggaggatgcatgtgtgctgagcgtgagtgcacagagcagaggcaaggagcatgtgagccttggcgaaaagaatgagctcccaaaggaagcaaaattcagggggagccacatgtgagaaagtatagaagggcaagtaagatggaaagagattatgacagtggagaaaaggagaggcccctttggggtggaaagagcacttgttgggagacccctgctggacaggaacagagcacaaaggcagaggagctgcaggggttgccgtggtaactagaagagggtgttgcatgggaagagaaagatgcagtgaggctgctgaggaggcagcgtgtgagcagtgagcagcttcaagccaggtacgaactaaattgtgaagaggtgatacaaaattacatgaagcagtaagagagaaaaaggtctgtttcccagaggtatgagagacccaaatcagcccagaactcacagggggacatgtatttacaagagatgagattggatagcatgttcttcccagctggggatggggaccccctgcttcctgagtcccctgcccttcccctctccctttccctccccctactggcctgtcctccctcaccctaccctcacttataaagcaaatgcactcgactcccatcacagctaagccggtcggggggctcagggggtcccctgggcaggcccccagagggttctgggggtgtcggtgggtggcgccgggagcggagctgctgccgagactggagttgatggcgcagttcagagacacgctcctctttctggaggaagaagcacaattgggatagtaggagaagaggaggtgatgaaggagtggggaggagggaaagagaggaagggcacagggaaagagaggaagggcacagaaaaatgtagggggaggacgtagggtaagtggacagaataaattaaaaggagaaatcaaaacagaacaagaaaagccagagaacataaggataccgatagaaaaaatgcgatcagggaaataagagagaatttaaaaacaaaaggaaaaagtggggaaggagagaaaagtcagtgcacagagcttccaataaatcagagagatgtgtcaacccagttggaacatccctctctttggcattgcaccagcccctaatgacagcctggggcacagtgaacgcctgcccaggtcctttatgctggggctgcatgctacacccagctgctgtgagtgttgactactagaggctcacagctgcctctctccagttgtcacctacagccaacagccatcctcttgccttaaggaggctgagtcaaccacatagctcccactccagagcccttccacctgccaggccaacactggattttgcctgagatagaatcttgctcagccctttcccctcccctatgctgctccattcactccttacaggttgtctcctaggaccctccctccatgagccaagaacatctgaccctgtatctcaggcttggcttcagacaacccaagctaagacgcaagcctcctggaccactccaacaccctaccctgacacccacccccgcacctcagcaatgatcttttccagttcacggttctccttctccaacagccgggacttctcctcctcgttgttgttggtcgatgaccctgtcttcatggtgtcctgcgcctccgactgccattcccctcgggtgatcagcctgcgcatctgggggcaaatgtttgggcgtggggtggcccagcaaggactgtactagtgactggctgatggaaggttggaggtggaaggaatgctgataagagttgggcccaaaacaaggggaggagtgagaggagggtgaacggaagggcagaggaactcagtaatataggaaggagggatggagggaacatgggaacaaagagggtgggagaaaagccagatccttaccttgggcacaaagagcacaacaagagtgatataggaggagaaaactatggcaagagaggcaaaggcaaaggctgcatcctgctggctggacagaatcatggtgacaggagcagtgatgaggcacaggacctagagggaaagacacattgagggagtctcaggtctgcaggctcagacaagatccagagtttacttcccatgggagggagtctatgcagacagtttcctggtgaactttccctttgaaaaggatccaaattcaggatcatcctcaaatatagattgagaaaaatctcaaactgtcccaaaccagttttcactcttggttaacccctcccctcaaggcaggaactcccaggatctctatgcacagattccgggtcctccagagtcggtccctggcaggaaatgtcaatagagtccagcccattaaccacagacaagcaatttaacgtctctgtgtttctgtttcctcacctataaagtggggatactaatatctacttcactgggtagttgcaagattaatgatacaatgtctgtagtgagctttgtaaactgtaaagtgctttatagacctgaagaattaacaaactttttaagacttctaagcaaccgatcccagatctagcattgattcttcctagtcctctatatctgggctgctgtggtcagcctacagggtcaatgccatggggtcagtgctcactgccacattgtagatagccatgcccacagcccggtgatcattgatcttctcagtggacacactcttggtctcataagcaaggaagattcccagcagcagcagcagccccttgtaaccatagaaaatgcctaggatggcaggagagagtcacttgagcaacaaggaccacaatgctcctcactcaatccccatcccctctctgcccttcacctactctgaaatggaaagggggccctcctctccaatccaacccctctgacctagcaaacctcaccctgtgtcccctatcccttatgtccacccaacttgcccagaccacatcactttttcctgggattcacacaggaaagcaatggtggcaagctgctgtcagtcaggcaagggcttgttgaatatctagaaataggccagtctgggccacacatgcctcacccttaccctacaggtgggaaggtggctttccaggcagagggtaggtttgcaatttgtgaccatgaatcgaacaatgctaataaggccaagggggatctaaaagataatgtcaagtctggaggtggggttacccccacttgttcctctgctgaacacaagttcttcatctgtgctttctgtgctttgggccctaagctcctcatagcaaaagagcaactctcccctattctcagaaaagattagtgcaataacaaagagtagggtgttcaaactgggttgacaagctctctacctcctcttccaaagacccctctccctccaagccctctacccctgccttccctcctgcctttgtgcatccctgccctcctttgcccacatcccacacaccaagccatgtattcatcttcctggagctgcaatgctccagctggggcagaatagagacgtcaatatcttccttaggttcctccttggcaaatgtctagggcagaaacaaggtcacaagaaagatggttgccagcctcccctcctctcctcaacgcttctcagtctctggcttccaactgttttcctatgagaccctcaatgctgatgccaaatctcattctaggcctaagaatgttttcctgaacccttggaggtgcttgttccccactttccctgatgcctggaagttctacacacccttcccagattcccaccccttcctttcttcagctgaatctggaggcctatgaggggctccttctaggaaggaaaggaagagcttccaatacgaggaaggcactctctccaagtagcttcatccctcaagacacacacagccccagggccctgatggccactgagccctgctcattctcctgaccatagcacctcctctccagtggtacctcaatggtccggtgcagagggtccacgatctgccagatggcgagagtgaggacatccatgcccaccagcaggcccactgtggcatacagcttccagggttccagagtctggataaatatgtggggagaacaggcacgtcaggggaaaatgctctgtgccccaggagccaaggatctgggggctgaggattgggcagcagctcaccttcctccactccttcttttcttccttctttgtgaagaccgtgtggacccaccaaatcttggtgaacatggaaccgtagcccagactaaagcccaggcccaggagccagaggcgggcctagaaaggaagagagggcacaggcagaacagggtagagtagtagccgggactgcagtaaggatgggcagaaccctaagggagagtgggcagggagcacgggcagggagctcatggtggcacagggaggatgcgaaaatgtgagcaggacggggagcggcaggaggagagcagtctccccaccttgaacaattcctcccatccaccctctacttccacaccaccagggtgatcttgctaaaacctcctggctttagtggccaaaaacctccaaccactccccaatatctataagttatagcctgaacacttctggatatgacacagacccttcacaacatgctcccatccacctgtccagctaggctcatctcccagccccacacctaccccacgctccagccatgctgaactactcactttctcttcatctactctctttcatgtattttctagccacacgatgctccctatgcccctgaagtagccttcctctatttctctagctgataaaatcctatttgtccttcagtattcaaatgccacctcttcagtgaggtccacccaatcacgccagcagtgaactgtgttcccttctttgcccccaaagcactttgtgcagatccctactctggaacctctcctattgcactacagctaattgtctgcttctccagctgcactctggcctcactgggaacagaggattcctgatgaactgcatgtgcatgtgcatggaaatgccatgtgcacagatgtatgatcaggacagcacagagcagaggaaaaagagagagcaaggacaggcaggcagatcaggagaaagagtgggtgtttccaccagtggaaaagagaaccactcaactatcactgttgaagctggcctctccccacagcactagaaccttccatgtaccaacagtcccagagcccctcctccctgtgtggcagtggtcccttccccccaactctctgctgtgtttccatctctgcttctatccttccaaacccaacaaaggctcccaaaaaaagtccacagttctgattctcagcccccataccacagacaagccaccattgttcaggagacctttgagcagatccccttcctttgccttcaatggctccctcctcttctctgcaaggcctgccatggcaaccttggaactgacaagtaaactacagaatgaaaatggcctgcagacacagaaagaagggacagagccaaacagagaacagaggggtgatgctagaaggaaagaacagggacaagagtcagggaaagctgaggaggaagggcagagaatcataaatcatggaaggtgctcctgagacgggtgggagagtcacatcctgtaaggaatttgcccaccacctcctcacctggcagacgaaaggaaactggttcctcccaatgtggtaaccatcgagccccagggggaagacagcagctaaagccagtgagcagcccacagcagtcaggttgttcaggttgggctgtgagttctggatataactagggcagaggtggagagggtgagagggagagagaattacccctcttctccagggaggctgagctctccaaataccacgcaatggcatgaccctaatttcagggccaggggctaaaggaagacaggattggagaagacagtggagccttgagaggcagagcaatgcagtcatggggctgaagatggagttgcagagggcttcccaagcacaggcccccactagaatacaggctatttatgtagagtccaagactgtgagacctggccccaaaggttgtttttttctcttcttttcttttttcctcccgttagctactttggagtaggagtgggggttatatctggtttccctgttttcattctcaacaagtcagaatgaaaaactccatgatacatggccatgggagttacacaggttttattctcatcctgtccaggaacatgatcagtatctcagagaggcagacaaggaaaacgtcagaagagaaacttaccggacatgtgagttgtagatgttaaaggacagacagacaacagctaggacaatgcccaggctggagagaactgagacggagataaagagtttctgtgacaggaagcggaatgtcttgatgaccagggtctggtcagctgggggggaccctcctgcatggcacaggggaggaagaggggaagggaaaagagaagggaaggaggacaaaggaatgaagacgggataggagaaaagggcaaagaactagattgctgatggacattcagtcattggctggggacatgaggccctaactgcactggacagaggttactgcaggcagaatgctcagtgccactggggccgttaggaagcaaccagaaatgagatgagaagatggagtgaatggtctatccataggttgggaaatgctgaggcatgtccccaaagttgtagtctttgtttttgtttgttctttaagtttttctgtctttcttacagcaaaggaaaatgggaggagaaagaaggggatcattaaaaaatgttataaggtttcttataacccaaatcaaagttttaaatgacaattatggaatcataaagctaaaaaggccttgaagtatctagtgtggacacctattcttaagacaaacaaaaaaagaaggaaagctaatctgaaattttaatcctggcagggtaatattcccaaatatgttttccagttattattagggggaagttcaaatttgtcagagttcaccaaaaaaaactaatttcaatttgcttagttttttttttaaagaataatttaggccatgcagcatttatagcaatccagaacattgtcctaaattcgaattgtaaaaaaaaaaaaaaaagggcaaaactccagcagtgctgggaatgactggatatctgctgggcagggcagacggcagccatcttcaatggttgagcctccccttcattctcaaggaggctttcttttatcagtaggtccttccttttgtccaccttcagtttctctcctatgtcctatcatttagaccaagtacacaaagaataactgcttgctttctctctttaaaaagtatattttgagggatgtaatactacctattaggtacaaggtgcactgttcgggtgacaggcacactaaacgcccggacttcaccactatgcaatatattcatgtaacacaactgcacgtctacctctaaattacataaaaataggaaaatttttaaaaatacatataaaaataaaaagcacattttggcagatgacaattacatgaggttttccctcctcctccatagtttaagcaaccgttttcctgacagagacagacaaagagacagctctgggcttgaagtagctggttcaaatatatcaagacaccaggacatctgggaaacccaaatggagtttccatttcccgccctctgcccaccccctgcctctaatccccagttaccccagcaatgcaccattaaaaatagtactaaccaccgcctattccctctccaaatacaccagtctcccctacccacgccttaggggttgtattcactctcacttaaccctttctcctggcccagctgccagccacattccaacctaacagtctctaccattccatcctcactcaaaggcatgactttttcccttgactgtcgagaggggctgaaggaaaatacaaacaagatccactcaccaatccatttatctgttttggaccaggaaagatcatccttggtgctgtcatagtagccaatcttcttgtagctgccacctgggcagacgacaataaaaggagtgaccacaggtagccaaagagctgatcctaggcattttcaacttcccacttccctagagctttgcatggttgtatctgattttattttcacctgaggccctaaggatgcttggaaggacctacgagactcttgaatcagcaacatgacttaaaagcaatataaggtggttcccaagacaactcaaataaataagaatatctatgtttaaaagtcttcagtgaggaggctccacaacatgtctgccacctattccattcctcacacctctctcggcgagatgtctctcactttgattttggcttctaaagctttacacatatttctgcttattcttcctctcatgatgggcaggctctattttcccagtggctttcattttaattttagaacattctcttctgttggcttgggttttaattccttggataagttatatctgcctcttaaagcgccattgagtaaaatttggtcatttctaagatttctgttctagaactgtttccgttaccataacttttccttcaaaagccaactcacactcctttcaccatggctgaagtccatttcctcttgtcctggatacaaagaggagctgaaaggatgtggaggtggggagaaaggaagaaagaaacttttcacaggaggccaagaaatagctctcttggccatgccgtaaaagactgagagccgagtggagcagaaaaattaactcctagaagttctgcaaatacctgtgtgctaagtttcaagaaaatacaatctacaaaagccaagctatacacattgaagctttacacagcaaggaaatttggcagattcccttaaaaaaaaaatagcggttctcctagattcagctttcttgagtctaactgacaggtcatcaacctctcaacccaagccactcaaggggaaattcctgaaattaatggaagccactgggaaagagagtagctgtttttaatttgcatgtctcttttcttttcttttttctttgagacagagtcttactctatcacccaggctggagtgcagtggcgtgatctcagctcactgcaacctctgcctcctgggttcaagtgattctcctgcctcagcctcccaagtagctgggactacaggcacctgccaccacacccagctaatttttttttttttttttgtatttttggtagagacaggtttcaccatgttggtctggctggtctcaaactcctgaccatgatcatgatctgcctgccttggcctcccaaaagtgctgggattacaggggtgagccaccacacccagcctgcacacctcttttcaagagcaaaaccagtgcaactcaaagacatcaatcttcttgtagttaagcttattattattattatttacaagcttgatgaacagagttaaaagagaagggcagaagttgggaggtgccagggcaatcttgtgatgtctctggcattcttccccagggggcatcccagcccagccccagcctagcccccatgtccggtcccctcctgcccctgtactaaccctgaagctgctcgataagcgtccatgccatccgagagccgctggcatcaaacaccacatggccctgagggaaggaacatgtggagcaaggcaaaggagacaaaagcaagagtgaaagagaacatcagggactctttaaatccttctgtttttgatgtaattgagcctctgaatgaatgctatttatggcatttgcctgcatataggacataccccagatgcccataccctagattttagaaacattattctttggagaaggagcttcacttatgagatttgaatgggaaaaaatccccagacagaacaccagcaggcttctggttgtgtggcctaagcaagtcagcaaatctctctggaaactaatcttttcattttaaaaggaataagaagatgacctttcagactgttttgtctttcaaaatcctatagttctcatctgactcatgaatacttggtctagtttgaaaagaaatgaggggaggggtttaaaaaaatggaatacatcattttttttcctctagtctttgatgggttcttctaatttgaaggtccctacttctctggtcggagactgattctgcaaagaagtaactgagaaaaacagagaatgcatgtttgtagaaggtgcctcttgggagtctctctcaagattgggaagacaggggagtatgaaggaagttttaactcacagagacaccctcaaaggacgaagagttcattgcccggtagatttggtcggtaatggtctggttgttgtagttgaagtcctccaggcgcacaccagaacggccgcctcctccagatgtcttgttcagggccagtgccaaggcccagatggcatcataggccagcggtgcctcctggaagcctcctgtctcctcagggtgtcttttcagtcgcttggttagtttctccacaaattcctgggatgtcttgggaggaaaaaatcatgaggaaagaactgaaatgtgtgtgggtgtgggggaaggggtgcaatccaattctgactcaatcacttctacttgaatggatggtttgtgttactgttgtcagattggacacatgtacattcaaaatctttaactatacccatgtgtctgccttagatcggaagctactagactagagtaggtattagctgtgtctgatggtgttagtgtgtacagttgctagctcagaactgcaaacagagaattttgacaaacactctggataattagtggcaaaggatggaaggtagagcagagtaaaggaggagacatggatattccaatgaagagctgtgacactgatgttctctgatccttctgactttcttcatagagttaacccaggatctaacagctcctacaattccaaaagattctagaaaaggtgatagcagtcttctcactctgcttgccagccaggaggatatttcttcagcatgctaacttcttgccattcttgtgtgcttttggttcactgcctcttagaaggctttcagaagaatgaaaactacagaaatacccttcacatttttgaagtccattatcaatcctacccacacccctcccaacactcaaccttctttttccatgaaagctaaaaagaatgatagttcctttaactctctcatgaactgggtcaagagacctgacttcatataccttgcagtaaccttgtttggctaaataactgtaagtaaattacttaacctcttggaactgcattctacatactggagaaaatcacatcattccttccttacctcacagaaaccatacaaggaaaagcttagcaactacttcttgggaaaccacaagtaatacacaggggaccatacaaataattgtttgggtttggaatgttttaacacaaacggtaatgaaagaataaatagatgaatgaagaataaataaataactttgttcctcatgccttgctcacttttctctccaactttctagagagatagaggagtgagatacgcaaagggcacaggcaaggtacagcagttgctactacactgggctttgaaggagcctgggctttgaagatgcaatgggcctaggttctacccttgaggacaagaccaaatcccatgccctctcttaatcatcagcatctagcactgtgcccaaccataatgaagtaacaataaatgtccattggattaggccagtgaaaatactctgtaaagtatttaatagtagatacgtctcattatacatttgtccaaacccatagaatatataacaccaagggtgaactctaatgtaaactatggactttgggtgattatgatgtatcaatgtaggttcatcagttgtaacaaatgtaccactctggcggaggatgtcgataatgtagaaggctatgcatgtgggaagcatatgggaagtttctgtaccttcatctcaattctgctgggaaactaaaactgctcaaaaaaaaaaaaaaaaaaaaaaaggccaggcacagtggctcacacctttaatcctagcactttgggaggccaaggtaagcagactgcctgagctcaggagttaaagaccagctgggcaacatggtgaaaccccatctctactaaaatacaaaaaattagctgggcatggtggtgtgcacttgcagtcccaactactcaggaggctgagggctgaggtgagaaaatcacttcaacccaggaggtggaggttacagtgagctgagatgacgccactacactccagcctgggcgacagagcaagactccgtctcaaaaaaaaaaaaaaaaggcattataaaaaacaagtcaggctgggcacagtggctcacacttgtaatcccagctctttgggaggccaaggagggtggatcacctgaggtcaggaattccagacagcctggccaacctggtgaaacccgtctctactaaaaatacaaaaattagctgggtgtgttggtgggctcccgtaatcccagctacttgggaagctgaggtagaagaatcgcttgaactcaagaggcagaggttgcagtgagcagagatcacgccactgcacttcagcctgggcgatggagtgagactctgcctttaaaaaaaaaaaaaaaaaaaggcagccaggcacagggggctcacgcctgtaatcccaacattttcattttcagaggccaacgcaggaggattccttgagcccaggagtttgagacaagactgggcaaaacagagaggacccaactctacaaaatttttttaaaaattagccagacttggcctgggcacggaggctcacatctgtaatctcaggactttgggaggtcaaggcgggcagatcatgaggtcaggagttcaagaccagcctggccaacatggtgaaaccctgtctctatgaaaaatacaaaaattagctgggcacggtggctcacgcctgtaatcccagcactttgggaggctgaggcgggtggatcacctgaggtccggagttcgagaccagcctgagcaacatggagaaaccctgtctctactaaaaatacaaaattagccgggtgtggtggcgcatgcctgtaatcccagctactccggaggctgaggcaggagaatggcttgaacctgggaggcggaggttgctgtgagccaagatcgcgccattgcactcaagcctgggcaataagaatgaaactctgtctcaaaaaaaaaaatacaaaaattagctgggtgtgatggtgggctcccgtaatcccagctactcaggaggctgaggcaggagaatcggagaatcgcttgaacccaggaggcggaggttgcagtgagccaagatcatgccattgcactccagcctgggcaacagagcaagactccatctcagaaaaaaaaaaaattagccggacttggcttggagcagtggctcacgcctgtaatcccagcacttcaggaggctgaggagggtgaatcatgaggttaggtgttcgagaccaacctgaccaacatggtgaaaccccatgtccactaaaaatacaaaaacttatctgggcatggtggcacgcacctgtaatcccagctattcagaaggctgaggcaggagaatcactggaacccaggaggcagaggttgcagtgagccgagatcacaccattgtgctccagcctaggcaacagagcaagactctatctcgagaaaaaaaaaaaaagttagccagacttggtggcatatgtctgtgatcccagcttacttgggaggggctgaggtgggtggatgacttgagcccaggaggtcaaggctgcagcgattgtaccactgcactcctgcctgggcagcagagggatactctacctcaaaaaaaaaaaaaaaaaaaggctgggcgcggtggctcacgcctgtaatcccagcattttgggaggccgaggcgggcggatcacgaggtcaggagatcgagaccatcctggctaacacggtgaaaccccgtctctactaaaaaaaaaaaaaaaaaaaaaaaagtctgttggatagataaatggatgaattcatattctaatcattttacctgctatgaaatctcaaacaagttattaaacctcactagttggttattcagctttaaaatgagaataatactatctaaaatagtatgaaatgaaattagaacatgtataaaaatgctgggtatgaagtaagttacattttctctacgtgaatttccttgactctcaacctcatctttgttattgatactcagatctataatttcagcccaatatttcaagtccatatttcttttctttctttctttctttttttttttttttttttgagatggagtcttgctctgttgccaggctggagtgcagtagtgcgatcttggctcactgcaacctctgcctcctgggttcaagcgattcttgtgtctcagcctcccaagtagctgggattacaggcacacgacaccacacccagctgatttgtgtatttttagcagagacggggtttcaccatgttagccaggctggtcttgaactcctggccttgtgatccacctgcctcagcctcccaaagtgctgggattataggcgtgagccaccgcgcccagcctcaagtccatatttctaactgactctgaggcatttttaatgtatgatgaataatctcaaaatcaaaatatccaagatgaagctcaattttttcttactcccaaacagctcccagtaaatgagactgaagccttggaattacatcagaccctttcaaatcactgagtcctcttaactcttttgttgaaatgtttcattgatatcgatccctccttacacaggatgatgatgataatgataacgatgatggtggctaacatgtatacagtccttaggacgtatcgagcattttcctgaggaaactatattaccttatttaatcctcaaacaatccaatgaggtgttattatccccattttagagataagaaaactgaggcacagaaaagttatataacttgcctataaaaaagttatactattaatgagtagcagagctaatccatactcttaccagccaccctacacagtctctgtacatgagactgcctctctctaagagcacctgcacaaatagcagctaggctaatactttgagtagtcttttggcttcaaattgaaagattggtctatccaatcttcagttcaaggtaaatatggcatcaaaaaaatcacccagaaagaaagggattaatctgctcagcacgatgcggtcccctgctcaggtggtcagaccctgtgctcacgccaggtcactaccactaacacgcctaaccactgggggcaccactgctcctgccaccccaagagtaaagaagagtagaatgcttcccccttgagtcagtaaagatacagttatagattgtcaaagagacactctactctgcagcttaaggaaatctgaacaataaagacccctcaacccacagcaattagttaatcaaccaagtgcaaatttatacctaatttttttaacagccttgtctggctctcaagaatggatgcttgacagtgggctaaaatgtatatcttgaggtagctttttagtttgtactggtcctaggtctgatgggatctctaccccaatcaagatttcctcacaatcttatctccaggatgccacctcccacattcccctctagcccacagctacatttctctaaaaccactctaacccactctccatttccacatattgcccctaaagatgttttctctaaactagggtttctcattctctgcactattaacattttgagcaagataattctttgttgccaggggctgtgctttgtaggatatttagaatcatctttggcttctacacattagatatcaggagcatgtatccctccccatcccctacccccaactgtaacaaccaaaaatgcctccagatagtatagcgtctgagtctagggtagtagttgaaaaccactaccctaactaatagttctcgaggtgtgatccccagaccagtacatctgcatccccagggacttgctagaaatgtcagttctcaggccctagcccagatctactgaatcagaatttccaggggaagggcctgataacctgtgaactaactacctttccaggtggttctgacggatgttaaagtttgagaactattgatctaaacataaggccatccttagggaataaaagcaactctgcttcttttctaagtctccatggctccggccccctaggtccaacccttgctttgatccacttctatttgtgctgtttgattaatctataatctcttttgcccctaacctattgttaagactgctctatcctcttcagaaaacattggcttccccactggcattttaggctggtcccactggaagccctatggcctcaaaagcaggaaccatctttctctagacacaaagtcagaaagggaccttccaagtcttcccaccccaatgctcaggtgtccctctatgtccctaaccatctctctgttctctctctctctctttttgtttagagctgggggtctcactatattgcccaggctggtcttgaactcctgggctccagtgatcctctgccttggcctcccaaggtgctggggactacaggtgtgagccactagatccagccaaatccctgttttctgtcagcctcctctagctccctgctataagacagaagcaacgattggcaagtcctgggctcagggcaccaacaagtctttctggctttggtagccagttccaatactttcccaggttttatggatgactcacctcttgggtactctacaggaaagtgatcttccaaaattttttcattgtatttttcaactaacataccttaaaacatagagtccatttagaatgtcccaaaacagtgtgtatcatcagagtccatgtggcagcagatctttcatcacaacacaccaccagagtcaacttcctaaatcttatttctcctttgctcagcaattgccagtagctaaacagtgttagcagataaaagtacaaactttttagtcaggcttcatggttttccatgggaagtgatgagcagagcagtttggagccagatttaactaggattcaattccagctggactgctgagtagctgcatgacctgagacaagtcattaaaccactctgagtctcattttcctggtctacaaaatgtagataagtccacatcagagttttgctgttagaatccctgaaatcatgaatctaagtaccacacaaatgccactgttagtaaaactttttaaatcaagctattttggggctttacaaccattaactcacccctaacatgctctccaaagcaggtacacacttggtgtaataagcagacacataggtggccgtatcgagcttacccaaaattcctgtactctttacaatgtagtgctgagcaacaaagaagcctcttcccctgtgcccacacccacactcacttctgcccctcagctgcagggctgccccagccctctcaaatcagagaatgcgcctcctcgctccaagtctgtcattaaccagctgtctggggctaaatgatttcaaaagccccttctccacataaaattctaaaaaaagaatcattaaaaaaagcaacaggatccaagctaattgcatatcaatcatgagtgaatattaagcaactctaaaacactaacataaatcaccaagaaaatgaaatgcaattctgcccagacacagtgctcctgtaaaggtgtgcttgagtatacaagcatccatattatcattaatgccggttcctcctgacttctcaccaactgctcctcgtctccatggtaacagcccttccactcatcaggaacctactgaacatacaactccatcgtttttttttttttctctctctacccaaggaagtcagagcaaaggtaggatccacaggaaacataatgcagacaagttcagggtgggcacagccccctcttctcctttatatccaaattccgcaccctctccctgccaccctttcccctgcaaggccccctcagtcctctccaccctcccaggtgccagactgcaagtccccacactctcaccatgttggaaatgctgcgggtattggcaggattcagcatgacaatctcagttgtgatgtggccctccaccgcctcagtcatctcatccactgtgcagttgatagaagggtcgtagatcttgaaccaattgtcagcataccacccaatgaggaaccagacgtacttcttcccaaagagacgctccttgtacacctgaatacagaggagaatggctgagtttttgtttgctcatttgtttgtttttgtcttatctcacttgatactatttagcctcttgggaatcagggaagagcagtagaactaaaaagagaaatctacaagtcttggggatagtaggaaaggctgacaattcttccttctaagtttctccccagcccctgtatttctgagtggccttttccagccagtcaggacagatggaattcatgggcttctcaggaaacacaaagcagtagaaaaatgagatctgaagaaagtatcatgtgtgtgcagacaagggatgcagtcagagccaacagacagagacatcctatgaatcgtcacctcagatcatatgctatcaactcaggcacagatgccaagaggaggccccacaagaaaaccaagggaaactcccacccagtgcccctccctcttcagatccaactccacctcacaaaaaactttccgggcttcagtctcatagaaaagtcccacgatgattcgggcatcctggcgctacaacagagaaagaaacagctcctgagggatgcccgggaatgcctgaggggctaagccagatgtcttcacagctttgatttcccatcccaaagtgcttagtgcagggtaacgctcaacgtatagtgaataaacgtcaactggaagatggagctaaacttccccaggagatgctattgcctcagagaatcaaaacctgcccccgcctggctttcctctccaaccagtcactgtcccccagcttggtccctccgtaaacagagcccaccactcccagccatctgaccttcaggtttttgacgggcacagctggatctgagaagaaactctggcggaaagtaatctcaattccagcctccttcactcgttcctccaggtcgtccagagtcttgggtgggaataaaaaacaagttggaaaaacacggggtgcatgagggaataaagaccagagaggttaactggggatttcagagcaatactcagatagagcaaagaagcagccattctgaaccttccttcaacagcttctgtccctgaagtgaggagttcgggaaggcatctggtcttaggatgtggattccaagtgggaaggtgaatggtgagcccctgctgaggctctgtgtgggggaagccactccattcacccactcctaccactgaaggcaaagatggggtaaagaaacataaaggaaccaggaaaagacaaggcaaggactgggacagacagcatgatgtcaacctcaagaggcaaatgggcagacagacaaaggatcagagaagaatggtctgaatcagagtgaaagtgggggaggattaaagggccactgaacacagtggatagaagacccaaagaatagaataaaagggagggagcagactgccttcttcagatgtagagcctgtatttcctctctacctccccaaatctccctcttccccctcaacctctccttgtctgtcggcttctctctcttagtaccaactaccagatccatgcagctgcctttctgcccctctctctcctctccctcattcctctctctctctctctttcctctccctctctcctctgtaatccactggctccatcccctctgttcccattcacacccacccaccaccccccttgaaagcctctggaatctgctgccttcctggattcctatctcatcttcgctcccatctcttgcccccactttggattgaacctactttaacagaactgagtcattctgggtctatatgtctggggaacagggcatcaaacaggggaaaaaaatcataaaatcataaagacagagaggatcccaaaaactcaactcattctttcccctggctacagaaagaactgcacttaatccacatggaatgcgttctctttcaatgaagaatcaagttcttgcccctaaaagtgactctcacgtcacatctcctggtgctggaatttgagcttatgtccctttaccccttgcccaacccctcctcaccgaagtgaagacctcagtggtctgctggatggtagcaatcttcttccagccccacttttcaaagagtttcacgcgggtagggttgtggagtgtggctgatgggtgcgttcggaagaaagtggggaaacgctgccggtttgacagggctggtgagctggagccataggaaagctgtggggcagggagagtgagtgcaacagggtctgttcactgaggacaccaagagtggccaagagttcctttaaccctcttcctgcctttgggtttctcttccttactctctccaaacctccccacctctggtctgcctaaggaaaagagattctcaaaggcccacacacccctcacaaccgggatgctctttcactgatctaatttcaattccttctgaagaaggaggtcagctgcagcactgtcaggccactgttgctaggaggctgcctagctcaggtctgcagaggactctgaatcttagtagcaggtcctccacactccttttcaatacaaacccacaatcgccatcgtcccttcagtagagctcaaaagggaatgaccccatcttctgacccccatagccctgcttaccacaatgaggttccacatcctagcagcctcagccaccagcgtggagacagagctgcagccaggcataaggatgatcttgatagggtcgttgtagagcagctcatataggtacttggtggcttggcctggatcacactgaaagacaagaggagatgagggcaagctctcctggggcccctcccctgtctgcaattcctgctcttatctttctcgaacaaattagttcctttctcaattactcactttcatcattaattaccgttttcttctcctttctggcatctcttcctgtcaagtgccttttttctcctctttcattaaacttccttctctgtcttccatctggagccttacccatcacctctcctgcacacccctcctttggtattaatgaacataccaccttacctcctttcagctcaccctcagacatcccccttccctctgtcaccaagccctttaccccatgtttctatgcttcaaacaccagtgggtggaagaagtcagtaggaatacggtaaactctttccacatccccagatagcttgctcaaagccatattatgaaaattccttcctcacctctgcaaaccccttctccccaccttccatttgtttcctccctcttctcttttcagagctagtgataagtaaagagagaacaggaacaagaccagtagggggtcccgctcagtgatccatccctcctgctgggcgctgacatttgacaggtccattagaaaaaaagacactggggggtggaagtagggaagaatgtaggatgaggaaagaacagagagaatgaatagaatggaactctcaagaaaccagacaatttgagaggtgccttaaagagaggcttggagctagggaaagtaaacaagcagaaagctggagaagaaaggaagcttgggaggaggggaaatgggggaggaagagccagccttgggtctcccactgcctgttcccctcccactgatatatgacatttcagaagctgctggaaccccaatgcatgtgaagacgaaatggcagccagtggggagccagggcagaggggacacagacagggggctcaggggactaaggagggtgaaatgttgccaggaggggaggataagtagaaaggaaataaagaaagcactctggagcctgcttacctcccactgaggcctgacatttgggacacggtgggaagttggagaagggggagccaggggaagctgttggaatctgaagaaccagcagtcactgagaattctctgttgcccaccctaccctcactctggccaagggcagtgctcaacaacattggaaggttttctctttatgcctcccactagggcaactttgtaaatctttaccattctcaggacccaccttcctgcactctccccacatctattactccagatcctgctcccagcttctcccacagcccctcagtgcccctccacttctctaaagacagggttaataggaacaatgaggacatacaagaacatataagatacatatcaacagggcaaggcatgccccccattttgtttcctgatttcttatctaccttttcttgcaaccgtttccctcttccacacactattcatcactgcagattctctccaccacgtgattctctccccctccccaatagatttccttagttctcctccctctctttgctcttgcaaggatctggatttgcaggcaggaaaccgactcattccaattgacacattctggttcttctgccttcccatcccaccccgcttgatgcctctgatgttctccagttcccttctcccaggtcccacgtctgctccccgccacctccagggaatcacctgtcatggtggatgagtttgagctcacagccaggcctcccctatctcctgtgatcccctatcataaagcctgcacccatctctccctgtcattttcttcacactccactccccaaaaccaatgatctctctgactgtcccaagtctgaccctctaccagatctgatcctctacttctcttcctgcctcccgtaccctaatacctaattattttcctgtaccctgctgctcttcccataggcattctggggttagcttacagctcaggaatccaccaagataggatgtctattagtaaaaatacagataaatacttgggattcatccctgaccaaggagctagaatctgtatttttaacaaactcctctggtgattcttatgtacactgaaggctgagaaccacgagaaagtaacagtcaaaaaggattttaagttctcttgccaagctcctgataatccttgtgctctcttctcttcaagcaccctaccttcaacctcacttctgtcccctcacacacctatcccagacacacacctatttctaggtgtatagtgatgttctaaaaatgaatataaatccttggatcaccccaaggttgatatttggtaagatcaccaaattctcaccttgtgtactctatttcaccctaacccaattccttaagtctctggggccacatgtcagtgaagataaatttgagatcttaaatctccttccctgtgtcacatccttccctgcacccccaattattcatgtaggggagaggggtgggaaaaaaaacctcattataagctatcccctaatacccctggacccaaatttgcttaccttctctctctccctcaactcacctccctaatccctacatcccatttcccttctcacatcctagaggccacaatgctataagggaagggaaggtcaggacccaagttccataaggtgccccaagatctctcattatccccacgctacctccttgcccctctcccccactgccattcttttctgttctcttctccttgtatgttgactcttcttcatccccatgctattgtgggggttcccatgtggatccccaatccaattcattttcccagtgcctctgcccacctcttgatcattagccttccccaatcaccatatgccatctatcccacagtctgggaatgctcaacagggttgggaatagaaggatgagaaggagtcaggtagggctcaccactaccttgctgttttgttaagataaataaactagagctctcaagtctctcaaaattttcctcattctgtccctattccttccagctccaacctacgccaagattttaccttgttaccatggtaaatgtaaacccccaatccagctccccacctctgacattccctccacccccaacccattccagggttagtttactccctcagaggatcagtgtctcctaataccttaaatccaccaccagtttctccaaaccccgacacttctgcgagactcccgcagcggggcagaagggtctgccttgcagcatgcttaaccatcttgagcccctagaccctcatcttggacctccagcccctgcgactctccccaagctcctgcacccccagcccatctcctgccagtcacacaagggaggggtctgcctcgcaatcccagagacgactcagacagatgggggcgcgtgcagctggctggccccctgccccgcaagcccccacctcccacccacccccatgtccagggctaccttgctgtcgtggtggatgagcttgagctcatagtccggcaggatgtccctgcggctattcacgtcctccagcgccatctccaccgcgggctggcaggcctggccccctggccagcccccgctcatgggaaacagtgccccgatgtacactgcgcgccgttctgaggaggggtgcggggggacccgcgagtgaggccgcgggagatggggggagtgggaggcccacaccggagccacccctgccgccatcacaaccagaagcggcagtggccaccccacccgggcaaaaggggccccgggccccatggcgtggggggcaggggtagctgttggggagcgttaggagctcaggggggacacttttcctggggagggctgctaagagggtgccggggaggcgcctccatccctgattttgtggggaggagggggcgagggccccggagaagcagggaaggttggcttcctacggcccccgcggctctcgccaccgtcgccgccaccgcggactctcctcgcggactgactgaccgacggaggggaggaggaggagcaggagggagatgtggggctgggagggggctctgacgtcacgggcggcgcgcggcagcggggggtgggggggcgggcgggagctggggaggcaggaagggggcggggagggaagcgagcgccgaggtgggagcgacagtcggaggggcggggaggggaggggggatgcaacctcgaggaggaaaggaacgaaagaggaagggagggatctcacttaaggggacccgaggggaggagaaatggggacggggcgtgccaggagggcggggtgggcggagggagccgcgggaggctgaagcacggaggaaccagggtaggaagggaaggatgcgagtgggacgggagagaaacggggctggcgcctgaggtctgaagtgggagtatgagtcgatacagtgaagcactgaggatgtgggggagaggaaacggttttggagggaacgagttgggtacggaagggaggctggtttgagggagtggtggggtcgtggaagggagcctggggctgggtagacagaagcctaagaaagggagacaggacatggaattgagaaaagacgagggaaggggtacacggaaggaaaagatgtggggaagagcgcgagaggcctggccagggttgggatgggtgggacaggctgagaaagtccattaggtgaaatcctaggaggcagcaggctggaaaaggttccagcgaaggtcgcaaggaaccccacaggggaaaacgtggtgggagctcagggtctcccagcaccctgccgccctctgctgggctctgcctgacaccggcgaggctcagtctgggaggaggtggagcccagggaagtgtagccaagcagggacaaggagagaccgcagcctcgtggaaaaccgggactggaggcaggaaacaggtagggagggaagggggtggccgcaaactggggtgggttggggaaggtgcgaaaggacgacgccccgtagcctaagggcagaatttcaggggggtggagggtgcagagtgaaggggagggcattgcagtgcgcgcggtaagggtttctcatctcacctgagtgtggcgttcgattcactggcagcaggaaagacggggatcagagaagagttaccactggcgcccagcttccctggcctgatccccagccccctcccacacctgtccatgctgaagaccggggagagcagaagcctgcgtttctgaggggagggtgcctggggataagaacaaggtgggtctgggggtaagggggtcaggacttattttcttcttcgatttttcataggacaacagaatttgagacgggaatgccaatagctaagtttggggcagatcttggttctgtggtgcctgaatattacaaaattgggagtctttaagaaaaaaaattacacatacaattggctttaagcaattgctgttaaaatcttatttctgcaatttttacaaaagcctgttaccatatgaacacatatccatcgagccctctatattattagagcacaggaagagggccctgtaggtgaggaaccttgaagtctaagtttcagtagtgtcataagtccacccctggatgggactctcaatttccagaataaaatggtaaactagaagcagaataactgagttatgtgaggaaagtaaagcccaaggatcttgaaagaatctaccagggtagaggaagtatgaggcatacaaatgggatgactgcatcccaggagagaagatggcagagagttcgggtgcctagaaaagggagagtttgtaaaattacgtggcaaaaaaaaaaaaaaaaaagtagacagacacaacactgattcccttagggaataatggaggttgtctaggaagtacagaaaaggacctgtcttcttcccaccccatccctgagttgttcttcatcttctgataatgctgcctccaattttaagtcttttaccctaatatgtttccacccccagagctccccttctcaatttttcttagtagaatgtttgatttatttctgagtctttacaataaatcaattatataaggaatggtgagggatgaattctagaagagggtgatgcatggaaatttctaagtttagagaaagggaaaattggagtatttaaacctgaagaaggtgagagaggtgagattcataaaggaaaagagaaaacgtgaggtctaagaatcgggagcaggaagatttttttaaaaggtaaaggaaggaagcccccaacctacagaggataccggggactgcaagaggaagtttgaggcaggtgatggaggaaaaagggactttcatctcccctttccagtgtcctcccccacatttttatagctctccattctttcccattatccattcccaccccactcccatcctcacacaagcgtcctcatcagctgcatgcaggcagctgttcccctcaccctggcagtggggcttgggggtgctccactggccctgactacagatgctccgggagctgcccaccagatggaagtcggggtcacaccggaaatccacccgggctccgtccagagctgggaggtccccacccgtcaggaaaaccttcccattttccagggtcaaataagacttggagcagattcggactgtggagagataggaaaataagaagagaggcgagttgaagaaggctctttccctttaaagagcaggggactcaggtgcaggtttgggtccacaagcatcctgctctaaagaaaatcacatgtgaaaaggatttgcctacctatcttccaatcctcccttacctgtgcaagcatccacacattcccaaaagaaaaaaaaaattaccattttaggaacccaagatggggctataagcacacaaaatgggatctcttcaaagtcagctacagtgggcggttctctggctttgaaatatgtagatgtatataactttggatgcacaatcagatttgcttttcttattatagttggcttctattaatattaaactggcttttgtttcttgggcatatggtctctgggttggtgacagaggtattcaaaaatgtgatgaaatcattttagaatttttttgtcatcatctgccactaatgatcctcaaagagaataactgacaagatgaattatcaatgttataggccaatgatcagtggcctaatgaagggaggatgaaatgaactgtgcaggctgctagctctactacctccaaccgcacagagcaaaattgctcttatgtagtagtcattcaataaatgtatttgtgaattttggtatactggatttaaagtgctgacttgcaagcagtaatgctaagtttgcggcaggaaaaggaatagtcttgaagaggggaggggcttccgaggctactcaccacagcggctgggtgtgtccatatctgtccaggagccgttggccaggcacttgcggaccttgggccccaccacctcgcgctccccccggcacacatactcaatctcatagtccactggcaggaagttgatagccttcacctggtcccgagtcaggccccggtacctgatgcccccttcccagggcgggtgtatgatctggcaacctaaggggtgagtcggggaggcatacagagaggaatggtgggaaagaggaaaaggcaggctccccagtgggaggaaggggagagtagggcgtggtctgtgggcaggctggggacagaggaagagggatggggcactagagggtgggagtggggacaggtacagatcccctggctaaaggacagagagtaaagggccagggttaaagctgatgagagaacccacaagtggggagggaagggtgctgggtggaggtaagaaagaaaagtaattaagaaatcatgaagggtatgatatgtgggtggagcttttctttaaaaaaaaaggctaaatgaggatattcgagttgaattaggataggaggataaagggaggctaataagatcatctggacagcaaagtgggaccaagaaaagggagtaattgaggtagtaatgtggggctgggaaaggggattgaggcggagaaaatgcacaggaaggtggtatagtgtagcaatgtgggcagagaaaagaggtgctggatagtaacgtggggtgacagaaggaggtcagcagtagtaaagtcgggccgagcagaaggggttgccagaccgggatgatatgtgggactgatgggatagtgatgaggaccagaaatgaggagatgcagggaaagggaagtggagcgaaggagggccggaggtcgtcgaagaaggatgcaccttctgaggtggcgttgggggtctgcgccccgcccgcgcccggggggcggaggaagagtggcgccagtagcagcagcagcaacatctaagtgagaggcggccatgaggactggaccgagccccgccggcgcggcccgcacccggagactactcgacctcttgccggttgcctcgcaggctccgaccgggctcagcctggggaccaagagagcgccccgcggaggaggcgggggcggagccccgcgcggggtggggggagaggaggagagaaagcctgtccccaccctcctcctgcctccctcggcccccaaccctcccgggactccacctctcaccacctcctctcccccggcccccgcggctcgcagaagcctggcttacccacgctcccggcatcggccgcctcagcgctccccgattccatccccgcggttcctcctctcccccagccccgcttcccccagctgggccctgcgcccactgccccctcccccaccacgccgcgcgccccctctccgagccctgctaacccggggccctggctcttacctcggcgcgcgggcccggctccccggctctccccgggcctcaaggccccaggcccggccgctcctccccgctcccccctcccttctcctccacctttctcctcctcccgtccctcctcccctcgaatccaggctccagcctggccagggtctctcccctcctctctcgcttcccccaaaccccacccctgtctcttcttccccggggcggcggcagccacgggagcggggagcggggagccgggagggaaggaggcggcgccggggaccagggagagctcccgggcggagggaagaaggagggtgcaagggaaggcagggcggggggaagagaggggaagaccggggagagggcgcctcccacaacccgagccccgggagccgccccggatcccagccccgccctggaccgcccacagcgcggtggggcgggcggtggagaggcgcggggctgagaggtgggggagagggaggtgccctggtgcacacgcactcgtcggggggcgccggtcactgccgagggacctgcgggccaaacaactggaagctggggtgggggagagggaacccgagccaaaggcagaggagctggcgctgagacagggagtctgggatgaaggtggagaaagacggctgcacaaagagaaggcagccctagatccgggtgagaggagagaggcagaggcagatgcccaggagaactgcgaccggagggcgagaaagaagcctgggtcagaaggaggtgggggagggggactgaggaccacctaagcgcaagaagggttgggtgtagaagagatttctgggagactagagcagctccatggtccagcagcattgctactcgcctgctctgcagggaacgcgcagaacggattggaggcaaaaaacaaaacagggagggggacatcaaggagagaaattgaagtacgaagggagtaaaaggacaagagaaaagaacctcagggtggtttagaagccagtattacctgatgtactccagcagagcctagcaaacagtatttcttgaccaagggcaaactggaagctctaaagacagcaggtacagacctttttgacggctccagaagctcttggctataccttgaagtggaggggtgtgtgtgtgtgtgtgtgtgtgtgtgtgtgtgtgtgtgtgttgtgctgttgttgttcgtaggcctgagtttgggctgggagaggaaacagtgggctccttgttgggggggacaaaaaaaaagctgctttctggctggtcctagggggaaaaatggtaggaagaaaccaaacactgagagactgactagaattgagattctcaacctccaacccttttttacaataaatattttgtaatgacacttttactgtcctaaattgagattcatagatgaggctcacgcctgaaatcccagaactttgggaggccgaggcggactgatcacttgagctcaggagtttgagaccagcctggcctggccagcatggcgaaaccccatctctactaaaaatagaaaaattagcgtggtgtgatggtgtgcgcctgtaatcccagctgagacaccagaatcgcttgaacccgggaggcagaggttgcagtgagccaagatcgcaccactgcactccagcctgggtgacagagcaagactccatctcaaacaaaaagaaagggaaggagggagagaaagtcatagatgatataacctacctacatacacaactttaaacagaaagcaaaatgcttccctttctgtaacgtaaaggggaaatgaaagaaaagtaacttgcaataaaataacataaacagtattttaatgtgtgagtgccaaggcccgactaccctagaagtcctgatggagtaagcagatgcttccacctattcacagaaccacggggatgaaactgctaccaacacaggctgatccaggtgctgagttggtgactcaactacctccagcatgttgccatcaatgaagtgatttaacaaaatgttgaacaactcttggtagcaaagttaattttccctaattttacacacaactataattgcattcctagaaagttcactgtatatttaaaaaaaaattttaaaactgtattaagttataggctcagataattaaacacaggttttcactacgtgaatgtcctgggggacttttgagaatctgggtgaggaacaattcttcaacatgtaggtagtgctttgaagaatatcttacacctctgccccaaccataaatgtcaatagtgccccttcccttatcacctgaggttgggagttcgagaccagcctgaccagtgtggagaagccccaactctactaaaaatacaaaattagccaggcatggtggtgcatgcccgtaatcctagctactcaggaggctgaggcaggagaatcacttgaacccgggaggcggaggttgcagtgagccaagatcatgccatgccattgcacttcagcctgggtgacaagagtcaaactcagtcaaaaaaaaaaaaaaaaaaaaaaaacagctaaaagatgcatcaaaatgttaacaaggattgcctctgggccattaattgttgcataacttttcttttttacttttttttttttttaaacaagaagtttatttaaacaacaagacgcttgacttgaagggaaaactatctaggattcttttttgttttagagtaatttatccctacttaaagacagattgctctgcatgtaacagctaagtacaaaaaagttataaaattgtccttggttttacaatgataaatgaaaaacattaaaattctccaattgaacaaggtatgcaaggatttttatgttgttgtttttttgttgttgttgttaaaacagtgagagcaaaataacttactggaatataaagataagagctgaatgagcatgccactaatggagaaagggggtattttcacagaatcagtatttttccgccccgtctccacttgatgtcaatcaaaacataccattggctgtttagttttaaaaaaaaaaagtaatatgcttgtgcacatataccagttactttatgtacagtaaaggaatggggaagggggaaatgaaagaatagagaaaactatacggtagtagtcaggatgtggtggaagcaaattgcagttttctaattgagaatgtaatcttggtctttaaagaacagagttctggagtaaagaagcaggttcccttttcagtagacacctcccgtctgctgttggaacacatcaattgtatcttcatcctccatttccaactgtgcaggtgtgtctgtttcattggttgcccgtcgaatcggaatctgatctgcctcattgacaatccctgtcgttcacaataggctttcattagtttactaagtggtgtatgcctcttaatcttaaactgcaccacagaaccatcctgccccgccaccttcaaattaatatgatcgttgttctcagtcttgactccttccttgggcttttcttcggccatggcgagcgccggagtctcctcagctgccgcttcacaaaagaggtaccaggtccgctccaaacgagcacacaagcagcaccaggagcggcagaagaaggaggcggcagcagtggacaaggggagagggtgcgcgcacgtcgtgctctccctccctccaccctcacttttctttttttttctttcttttttttggtggggggacggagtttcactcttgtcacccaggctggagtgcaatggcgtgatctcgactgacggcgacttccgcctcccggattcaagcgattctcctgtctcagcctcccgagtagctgagactacaggtgcacaccaccatggctggctaaattttgtatttttagtagagacagggtttcacaatattggtcaggctggtctcgaactcctgacctcaggtgatccacctgcctcagcctcccaaagtgctgggattacaggcataagccactgtgcggggcctgcacacttttctttcgtcatatttgttgttcaacttttattcaaatgttttacaagtgtctcctctataaatcatttttaattgatttataaaggtttaaagaaaaccttcctagcaagttgcatcagtatagctaaaatctgttacttgtttgggaggcagaggcatttgagggtacagacaagggctccaattatgttcattatacaaaccactcacctttttccaccagtagctacaacttccccctttcacatcttttcatattccaatgtcactgccaggattcctggccatatttttcaggatatttgtagaggtccttccagaaccactacttgagtatcctaatttcatcctccccacaatcaatctacttccttcttttccttttacatcaagcacaaaacttctttcctctggaaggatccccaggcttgatcccatccttctctcacttctgtacaatttgtgcctttggcaatgccatctccttttgtagtttttgacggtttttcatagagatagtggagttcctactcagattactggaaaatgacaaatcttattcattttagttcccatactttctttttttttaataatttttattttttattcttatttatttatttttattttatttatttatttattttttgagacagtctcacactgtcgcccgggctggagtgcagtggcgcgatctcgctcactgcaacctctgcctcctgggttcaagcaattctcttgcctcagcctcctgagtagctgggaattaccggcgccccaccaccacgcccagctaattttttgtatttttagtagagacggggtttcaccatgttggccaggctggtctcaaactcctgacctcatgatctgcccgcctcagcctcccaaagtgctgggattacaggcatgagccacggggcctggcctcccatactttctttctacttccttttctctcttctgcctcatcttccatccatccctgagagcatatagcccagaatttaacactctgggagccctgaaaacatattaaccaacgtagttcacttgattgatgatcaggtagatgctaggtacattttgggagtatctcattaaattctcacctaaccacacagagtggatattcatgttctatactgagcctagtaaactaccatttaaagaaagtaagaagcaaatcagaggtcacacagctataaagctgacagagccaacatttgaacttaagttcgttaccctattttcaaattctttctactgcattgagaggcttagttttgaggcacttctctcacccaactcccactccaaggctttttctttctttctttctttctttttttttattgagacggagtcttgttcttttgcccaggctggagtgcagtggcacaatctcggctcactgcaacctccgcctcccgggttcacaccattctcctgcctcagcctcccgagtagctgggactacaggcgcccgccaccatgcccggctaatttttttgtatttttagtagagtcggggtttcactgtgttagccaggatggtctcgatctcctgacctcgtaatccgcccacctcggcctcccacagtgctgggatgacaggtgtgagccaccacacccggctccaaggcattttctgtcaagggtcaaactgcagttctattctctcatctaaagtagtggtgatcactgggtgaatggaagatgttcatgtcctcttgggttaggatgaaagacctgtcttctgggagagttttctgtcctgtaacagctcttgctctttagaaaaatgtatagggcaaaggtttattattcaaacgtgaagttatttacactctgggattcactctggctttttagtgaggttttgaatcctttgcatcatatttaatatcactaaaataggatatttttgtgaaactgtttgatccttcccctcagtttccatttgtgtgttctctttcttcccgtcttgataggcacaggcactcagaatcactgggccagaaagaagtaagagagtaggccgggcacggtggctcatgcctgtaatcccagcactttgggaagccaaggcgggcagatcacgaggttatgagatcaagaccatcctggctaacacggtgaaacaccgtctctactaaaaatacaaaaaaaataattagccgggcgtgatggtgggcgcctgtaatcccagctacttgggaggctgaggcaggagaatggcgtgacctgggaggcggagcttgcagtgatcagagatcgagccactgcactccagcctgggcgacaaagtgaaactccgtctcaggaaaaaaaaaaaaaaaagagagagagagtaagggaacatctttcgttaataaaccctctctattgctccccacacacaatcctagtttggttgctgtcttcgtctgtttgggctgccataacaaaatctcttgcaccgggtaacttatgaacaacagaaatgtatttctgacagttctggaggccgggaaatccaagattaaggcactggcagattcagtgtctggtgagggctggcttcctcatagactgccatctgccatctgcgatctagctgtgtcttcacatggtggaagggcaaacaagctccctggggcctcttttagaagggcactaatctcatttgcaaaagtccccaccacttaataccacattgcattggggattaggtttcagaacatgaattttgggggaacacaaacattcagaccatagcagttgtacattcttggcagttctggccttggtttattgtgccaataaaagtaagctcatgaagctatttctatcatgtctttacaggcatgtacaggtgagcccagtttgggagtcacaaaacttcagtgaaattaaaaagccacactatgagtacctgcactagcacttaccactctcacacacaagaatccctgaggcagtggggatcctacccctgtctcaggagtgcacagagccaataaccaaattacaacattgacattgtgaagttgcctctagaaataatttctcaataagtacacctttatataataagtgaatgaacacaatgtaattaaatgctagattaacctaagaaacaaaaaggaaaatagcttctttgtccgttcatctacaggataatgaggtcatgttaaaagacttagaaaaggttcagttctcctgccgggcgccgtggctcatgcctttaatcccagcactttgggaggcctaggcgggcggatcacctgagatcaggagtttgagaccagcctaaccaacatggagaaaccacccatctactaaaaatacaaaattagtcggccatggtggtgcatgcctgtaatcccacctactcgggaggctgaggcaagagaatcgcttgaacccaggagctggaggttgcagtgagctgagattgtgccattgcactccagcctgggcaacaggcaaaactgtctccaaaaaaaaaaaaaaaaaggttcagttctcagaaacacaaatttaatgagcattttgaagatctcaaaataagtattatatttaattaaacatgtgtaattaagtatatactggtatgaatatctacaaataattattcatactaatctgaaaaacgtatgcatcataatgtgtgtatataattggttgctaggggatttgtttgttcattttgctgcaatagatttctgtctctcgtcatattctgttcaagtacctaaaatgattgctcacttattcgaagcacactaatgaaataatactcagagtaaaaggatatatcacccagatttttctattagaagctacacaatactcaaaaatctatcatttaatatgtgtatgcaggtctaaagcccataataagcaaaaatatattttcacgttaaatgtatggctatttacactagatgaggtaaagaaagactataaatagcttcacatctcgttttgtcacagaatgaatgcaagtcaggccaggctttgccgccaaatgagttacaaaattttggttttcagagtattgtgaattttggaattgcagaaaaggatatgtgaaactgcttataaacatgagaagatgtttacagatagatgttttagaagtcaaatgaacaaatctgaagcaacagactagaaattctattcatggaaatatgataaaaatgccagtaagagggctgggcgtggtggctcacacctataatcctagcactttgggaggccgaggcgggtgggtcgcttgaactggagtccgagaccagcctgggcaacatggcgaaaccccatctctaccaaaaatacaaaaccccgtctctaccaaaaatacaaaaaatcagttgggcatggtggcaggtgcctgtaatcccagctacgggggaggctgaggaaggagaattgcttgaacctggaaggcagaggttgcagtgagccgagatcacaccactgcgttccagcctgggcgacagagcaagactccatctcaaaataaaataaaataaaataaaataaattttaaaatgccagtaaggatctccataaaggctatgtatgaaaacctgaccatgtcacatccatgaccctattacagcaggtcagattaatcttaccctagtccagagaaccacgggaaccactgagtcctagtggagggaaagcctggaacagatgtgaagcaagcttggcttttagcaattgagagtaaacaaacacctgctgagtttactcttccttgcctgtctttctaagccatcactctgaagacctaaaaagcagacatgactcatacacaccttcagatgctttcagtatttgttacacctagatctgtgcagaaactgaataccttattggtgcataatttacaaagaattctcacattagctcttctaattctttctgttgtttctatatgataatatctccatttgtcagataggaaaactgaagctcagaaagtttgaatgaacttcataagatcacacagccaataaataccagagcttggcctcaaagtcaagtctcaggtccttctgcccttcactaacagtgctccagccatggtcgtctgactgctgttctttaaacttccttaactttcaactcagaaaccaaacacacccagctccctctgcctgggcgtggtgctctgttcagcctcctcaccccacacccatgttgctaacagcttaaatggcacctcctcagtaaagcctcccctgaattccccagacttagaacactgtttccccaatcccactagccactctcatatatggcatactgtagtcattgttttgtttgtttgttttttagaaagagagagagagagaaagaaaagaagaaacgaaagaaaagaaaaaaagaaaagaaaagaaaatcaaaatccatgtgggtgtggtggctcatgcctgtaatcccagcactttgggaggccgaggcaggcagatagctgaggtcaggagttccagaccagcctgaccaatatggtgaaaccccgtctctactaaaaatacaaaaattagctgggggtggtggtgcatgctaaagggaagggaaggggaaggggaagggagagaggaaggaagggagggaggaaggaaggaaggaacttatctccgtctgggtaacatgaggagaccctgtctctaccaaaaattaaaaatattagccgagtgtggtggcatgagcctgtagtcccagctacttgggaggctgaggcaggaggatcgatttagcctaggaagtcaaggtcagtaagctgcgatcatgccaatgcactccagcctgggtgacagagagagactctgtctcaaaataaaaataaaaccacaaaacttatctcagtggtaattaaggtaactgtggaatcgtgtatttacatttgccttcctgaccagaccataaactccaggagggcagggattttgactatgtggctcattttatcccactaaaagagctacatattttctgactcagagatgagtttcattccattgtacagaatgatcacaccagtttccaagtctattaatctagcggtctctgttgtttgttgaagacctactaggtattggtaaaatgggttgctttgttccatgggccataatagtgacacattctaaacacatttaagtcattccaccctataagttacaggataataataataatagcatttattttactataaccagttttgggctgtgtgttttacttggattgtctcacttgctccttatagcattctctgatatagatattagtcttcccatttacaaaatgggaaaactgaaactcaaacatgtttaataatctgcacagtgtctcacatgtaacaagccaacatgagattagtgattccaaagaccctgctcagcccaatgacaagatgtggaaagcaccctcaaggcacccaggggtctctctccctgagagtcctgtgcatatcagcaatgctgctaaggattaaatcactgcggttatcactatgtgggtaagatttctgttagtagaagatccagaagattcaccctgccatagagcagggggccttggctgagccataggcagaatcactctccaaaaagacttaccagtgtttatctgaatattttcttttagcaataactttacttacttgcgttatttgtaggtgctgccattttgctgtccatgatgctactatgctcagtacccttactgtactgcccagtagcccttaccattagcaaactaaagcttcctcaccagcattagacctggcaagacctctgtgcatcccccaccacccatgagcattttgatagcattgcaagtataatctctggtgcatgcacaaattctgctccacatagcagcgctaatggtggcccacatcgggaataggagtagagcaagatgttaccaggaagagggccttacttctcttctctctcttctcgctgcttttttgtttgtttgtttgtttgtttgtttgttttgttttgttttttagatggagtcttgctccattgcccaggcgagtgtagtggcgcaatctcagttcactgcaacctctgcctcccaggcctgtcccagcctcccgagtagctgggactacagatgcctgccaccacgcctggctaatttttgtgtttttagtagagatggggattcaccttgttggtcgggctaatctcaaactcctgacctcaggtgattcacacgccttgacctctcaaagtgctgggattataggcatgagccactacgttcagccattcgctgctcttaagaaagtacttttccaaagatcattctccttggtcttatcttaagatcctgctatgaaatagggacacgggtggaaaattttcacctgtgcctgcagcaaactttcattctgtctgaataattataagtaggatgggggaggggagaagaaaaagagaccatgatctgaagaaccttaactgttcccctgttatccctggttactgtcaagcagctagcaggctaggctaggtggggtatcttctttaactctactcctgcattagctgttctaaatcctagaactcatgccctgtttgaaatttctttccctatgcccaactcaagtgatgccatcctattttctattttccaccatgggaaaaatggaaaataacaggagaaatgtattaagaaagcattcttgaatttgagtttgttaacttttttttttttttaacagtcttgctctgtcacccaggctggagtgcagtggtgcaagcttggctcactgcaatctccacctcctgggcttaagcaattcttgtgcctctgccacctgagtagttgggattataggcatgcaccaccacgcccagctaatttttgtaattttagtagagatggggtttcaccatgttggccaggctggtcttgaactcctgacctcaagtgatcctcccacctcggcctcccaaagtgctgggattacaagcataagccaccacccccggcctgaatttgttaacttcttaccaacattttacaaagaagattgaaggtaatgtgggttctaagactgaagagtacaaggtaagctggtggttaatggggaggagggatgatggatgaactggtcagggaagaggatgaaatggctcaaaatagaggtacaaatagaatgggctgggctcctccaaccattccttgtgattttatttttacttttttttttttttttttggtggagtttcactcttgttgcccaggctggagtgcaatggtgcgatctcggctcactgcaacttccacctcctggattcaagtgagtctcctgcctcagccttctgagtagctgggaatgcagatgcgatctcggctcactgcaacttccacctgggttcaagtgattctcctgcctcagccttctgagtagctgggaatgcaggcgtgtgccaccacacatggctaattttttgtatttttaatagagatggggttttgtcatgttgcccaggctggtcttgagctcctgacctcagatgatccgcccacctcggcctcccaaagtgctgggattacaggtgtgagccaccgcgcctgacctatttttacttttttaaaagacaggtctcactctattgcccaggctgctcttgaactcccggcctcaaccaattcttcctgctcagcctcctgagtagttgggactacagcactcacaactgtgcctgacccttctcttaattttaactcctgagtgattttcttctctggaccccaaggagtcatgatatctctaaattatatcctgaagttatttcaactttagaaaataaagttttaggcctggttcagtggctgacacctgtaatcccaatactttgggaggctgaggcaggcagattgcttgagcccaggagtttgaagctaacatggcaaaaccccatctctatcaaaaaaaaaaaaagaagaagaagaagaagaagaaaagaaaaaaggctaggcgcggtggctcacacctgtaatcccagcactttgggaggctaaggtgggcagatcacgaggtcaggagttcgagaacagcctgaccaacatagtgaaaccctgtctctattaaaaatactaaaattagccaggtgtggtggtggacacctgtaatcccagctactcaggaggctgaggcaggagaatcacttgaactggagaggcagaggttgcagtaagctgagtttgcgccattgctctccagcctgggtgacagagtgagacaccatctcaaataaaaaagaaaagaaaaaaaagatcttggaatgctttttttctgcctgtgtattgatattattcttaaggggctcataagaaaactaaatatatatatttacatatatatatatatataaaatcacccaggttggagtgcagcggtgcaatctcagctcactgcaatatctgcctccagggttcaagcaattcttttgcctcagcctccccagtagctaggatttcaggcatgcaccaccatgcctggctaatttttgtatttgaagtagagacagggtttcgccatgttggccaggctggttttgaactctggacctcaaatgaccctcctgcctaaagtactgggattacaggggtgagccaccatgcctggcccagaaaatattattgttatttaatatgacctgccataactaccattaaaagtagtacaggtgtgcaaaagaaacttatctggctatggctgggcgcggtgctcacgcctgtaatcccagcactttgggaggctgaggcagactgatcatgaggtcaggagatcaagaccatcctggctaacatggtgaaaccctgtctctacaaaatatacaagaaaaaattaaccgggcatggtggcgggtgccagctactcgggaggctgaggcaggagaatggcgtgaacctgggaggcggagcttgcagtgagcagagatcgcgccactgcactccagcctgggcaagagagcaagactcggtctcaaaaagaaaagaaaagaaaagaaatcttacctggttgtaagatttttttctcatttagtcaataaatatttatggaatagggcagtttgggatcacacacatgagctaagcatgatgtcagccttcatagctcctacaatgtggtatggtgatttttttttctttttgagatgggagtctcactgtgtcaaccagcctcaaacagtccttccatctcagcctcccaagtacctgggactacagatgcatgccaccatgcccagctacttttttgtatttttgatagaaacagggttttgccatgttggccaggctgatctcaaattcctttcctcaagtgatccgcctgccttggcctccaagagtgctgggattacaggcatgagccactgcacccagccaatgattttaaaactggaatacagaaagagaagaagaaagtcatgctccatctttattatttaaaaatcagaacagatacacatatttgttgtgagcactaattaaaatatccttaaagtttccttaccttggagtggaattatttgcatatgtatacacatgatgctgactttagaagaaaagttacaagttaaaacacgtttgattaataaaagaaaaagaaataaattatacataaatttagctttgttgctgaaaatcacctctccaaacatagagttcaggttggggcaaataaaaaattgcataaaacaaaaaggctaagaaatggtacaaaaaactcagagaaccactacttcacgtttcccaataaagcatcttttatatttataaaagttaagcctgcatatctctgcccccaattgcagcagaaacacctgaaaaagaatgccagtctggtcttgctctgacaatggttttctgactgaccttgagcctgtcacaacccgtctggcctcaatttcatcaactgtaaaataagaataaaactatttgatatctttaactcacatactattgtgagaaataaatacaatcatagacaaatgttttcagaatgtgaaaatgctataggaacacactttttctccagtggctggcataaaagtgttggtatgctataccaccaagtcattagatatgagttaatttctggattactgtttcagtaagaataagctctacacaacttcagcaagtgatgttggtatgtcatccacaaagttctatcaccctattccatagcatacccctgttgaacttcccacatccctgtcttcccttagcttcctgtatccaacctcagcgcaatagctcagtttgaccattagatggtaccagttacaaggcaaacttaggtcccttcagaaactgagcatttctaaaaagcaaatattttttcaggtttgtttgtaacttaaacaacaaaaaaatcattattttaaaggccatatgctcactgtgaaaatatatcaggtggtgtatgaaataataagtaaattatctgccgggcgcggtggctcacgcttgtaatcccagcactttgggaggcctaggcgggcaggcagatcacgaggtcaggagttggagacaagcctggccaacacagtgaaaccctgtctctactaaaaatacaaaaattaggccgggcgcggtggctcacgcctgtaatccccgcactttgggaggccgaggcgagcggatcacgaggtcaggagatcgagatcatcctggctaacacgacgaaaccccgtctacttaaaaaaaaatacaaaaattagccgagggtggtggcgggcgcctgaaatcccagctactcaggaggctgaggcaggagaatcgcttgaacctgggaggcggaggttgcagtgagctgagatcacgccactgcactctaagagtgaaaccatgtctcaaaaaaaaaaaaaagtcaaaaatactaataaaaatactaatctcgtagttaacagattgctgtgacctagagcaagtaaaggtgtaattatcagcctataggggttagagtggcaagaagatgcctgagggtgagcctacagcctaaaagataatagaatacaaaggctgaagacctacaggcagggattctttgtcattcattctttcagcaaacttattctaatatgtatccctcactattcaatgcccaggagggcacagggaaaataagacgaagtcctgccctcactggctaacattctaagcacaggtgctgcacaagaggtgttatgttttttgggggagccagacacaggcctaagcactttatgtaccttgtctcatttaatcctcacatcagcaccacgaggtgacagaattatcattttgcagttaaataaattgatatttcttcatggccaggtgcagtggctcacgcctgtaatcccagcactttgggaggctgaggcgggtggatcacctgaagtcggagttcgagaccagcctgaccaacatggagaaaccccatctctactaaaaatacaaaattagccgggcatagtggcgcatagcctgtaatcccagctactcggaaggctgaggcaggagaatcacttgaatccaggaggtggaggttgcggtgagccgagatcgcgccactgcactccagcctgggcaacaagagcaaaactccgtctcaaaaaaaaaaaaaaaaaaagagagatttctttaagctctttgcctagggtcacaggtctttccacaggaccgtagactagagtcagatgtgttcctcaatcaattaggaaagggtggtgctggaatttgcatctgagtattccaagcttctatattctcatattctggaatgaggatattatgagtcctgaaacaactctagaaattctaggctacataattatccctccataacgtgttctctgccagaataataatgaaaaaaaagtactgtggtggccagaccccaagatgattggcgaagtgaaagttgcccagttccaaaatggccaccaccgcactttcctggcgtcggagcgactacgtagtgacagaaggaccatcagcaggtgggtgctcacagggactgtgccagttgccaaactggccacctgggcctttcttctcctgagcaacagccaagcaacattataggcttcaggcctacctagcccaggctgggttaaagcagataaacgaagcggacagcggaggaaaagcacgtaaccaagtgcagtgggtctgaagcgaaaggcaagaaaagctctgcccttaggaacggggtgtcactgcgcggctcgcaggcacctctctttgacctatttataatctgcgccttattctccgcccccaaaggctgctggcaaccaattctcggtggcgaagtcgtgacgtcagctgttgcgggtcagattgggagagcttcctggtccttacctagcaagattctgccgctaggtggcgaaaagcgaaggggccaaagaaatggaaagaaggcgaggaaaagcgggagaagatggggaaggaaaatgtatattcttgtatcatcctacagctaggcaaaaatattaggataatgtggcctaacctccagttctatgttggctggaaaatccaggaatgggaagctcactcccgtagttcccactcattcccaccacggttggacagctctgaaggagggaaaattctttcttttgagctgaaatctgccttcagagtcttgcacccaactgttctaccccacggggacctacagaacagcccaaagcctcttacgcaggacaacccatagcagtttgattaaaatcagcgcaaacccattcccatttggtgaggggggagggggaggggcaagcctcagtgcctgactcacttgactcacaagaagctgaatgtttttccttttgaaagataaaaatattgtgaatctcagactaacaatagggaatacacaaaaatggaaaaaatgttgatagataaaatttaaacctttggtagaacataattagttttttgttctctacatttttccatatcgtttctaatttttctacactgtatgtgttacttaaagaaataaaccagtaggccaggcgcggtggctcacgcctgtaatcccagcactttgggaggccgaggcgggcggatcacgaggtcaggagatcgagaccatcctggctaatacggtgaaaccccgtctctactaaaaaaatacaaaaaattagccaggcatggtgacgcacccctgtaatcccagctactcaggaggctgaggcaggagaatggcgtgaacccaggaggcggagcttgcagtgagccgagatcgtgtcactgcactccagactgggcgacagagcaagactctgtctcaaaaaaaaaaaaaaaaagaaaaagaaataaaccagtatggccgggcgcggtggctcatgcctgcaatcccagcactttgggaggacgaggcgggtggatcacgaggtcaggaaatcgagcccatcctgaccaatatggtgaaacctcgtctctactaaaatacaaaaaattagccgggcgtggtggcgggtgcctgtagtcccagctacaaaggagggtgaggcaggagaatcccttgaacccgggaggtggaggttgcagtgagccaagatcgtgccattgcactccagcctgggcaacaagagcgaaactccgtctcaaaaaaaaaaaagaaagaaaagaaaaagaaataaagcagtatgaaagagcagcccctggctgcattcaccacagcacccatgctcacacatgctacaggcgctcacttgctgggagctgcctcacattgattcggatcagtgttctcatttctccgacctacctaggaagcatctggctaaattgatgtaaattagacattttatagtctatcggtcattgagcctcagtggaatatctagaccaatttaaacacacaaatattatgggaaatagggccacaaaagtagaaaagaaaacgtgaattcctctttatatttatgccactagagggagttccagaagaaaatcactgcatgtaagggctaatgactgtatttactgagtggttactgtgtaccattcacagttcacagggactcattcatgtcattctcatgataaccctgatgaagtggatgatattattccctcactcactaaggagaaagccagggtacagtgaagtatacaactttgtgcagggcaatttatcaatatttattgaaattaccaaaaaacatgctctctgaacaaactattctaccagtgtagaaagcagagtaaacttcatgggtgagtgaccagggcagtcacacaagggccccatgcttagaagggatactgtgtttgggttctaaagctctgtggttcctgtcttgaaattcttaataattttatctttcaatttgtgtcttataatgaagtccgatgagaaagcagaacatgggctagagacttttggagcctggctcaagcgaggtcctgctccccatgcctcccagcctccccaggactggttttcagctgccggctccaccaccttctgtgcaggctcgctcccagcaggggcctgggaacagtggaaaggaggggagcggtcaggcatacacacctcccttgccaaatggaaggcatggccctaggcacttgtgaagatctgcacttccccctaggtactcctgtgcctggagtgtgacattaaattaaaaaaaaaaaggccgggcgcggtggctcacgcctgtaatcccaccattatgggaggccaaggcaggcggatcacgaggtcaggcgatcgagaccatcctggctaacacggtgaaaccccgtctccactaaaaatacaaaaaaattatctgggcatggtggcgagcgcctgtagtcccagctacttgggaggctgagacaggagaatggcttgaacccgggaggcggaggttgcagtgaaccgagattgcgccactgcactccagcctgggcgacagagcgagactccgtctcaaaaaaaaaaaaaaaaaagaaaagaaaaaaaccccacataataggttgacagtggaaccacagaaaaaaggaaaaggttgggttttttttctgctttttattttctattttattattttttaatagatttatttaactagagatggggtctcactatgttgtaaaggctggactcgagaccctgggcccgagcgatcctccaacctggtcctcccaaagtgatgggattacaggcgtgagccactgcacctggtcttttcctgctattaaacaaggagctccatagtttcattttgcccctcaaaatatgtagctggccttagtagactgatattcattgccaaattatatgtaagagcaaaaaggttgaaaatgatggcctgacattgatcaatttgtgcctttaggtaacatataactgtaatataactgcaatacaactagaatataactcataaaggcaagaatcttgtctgccttgctgaaagttttataatcagggcctaatataaagtatgacacatagcacttgcttttaaatatgtattgatttaaattaattgagtacatttttgcttcatcctagtaaaaataggtatttaaaaaactgaaacagtctaaatgtcttgggatgctacttaaataactatattatattcatccaataaaatattgtaagctgtttaaaaataacaaggatgttctttaggtactgataaggaaagagcttcaagataaattgttaccatttatgtaaaacaggtgggagaagggagagggagggatgtgtgagcgctacttgcagtactcacaggcagtgactttcgtggagcgccctctagtggtatatatatacaaacggaaggatttagagaaaatacagatcggctttagctggctgagatttattttcaaagcatgttactttataagaatcaatttttatttaaaaaatttttttgagatagggtctcactctgtcgcacaggttggagtgcagcagcacgatcagtgctcactgcagcctctctctcttgggctcaacaggtgcatgtcaccacgtccagctaacaatcaattttcaaaagtacaaaaaagccatattatgtattaatgtggaattatgaattaagtagacaacaagaatcaaaacagggtgtctattatcacttctgataacataaataatgtaaagatacatattttacagattatctgtaaaagcttatacagtactgttgctgggtatttatgtaggaaagctaccatttattgaatgcttactatttcacatatggacagcatagagcatgttaaaaaattaccacacacatttactgtattcaatgtgtcactctgaatatattactgtgtacatggtctgtcattggacatggtgagagatgcagattaagctgaaattactgaggacagcaacactggaagaaaattgagctgggtgtagtggctcagcctgtaattccaacatttcagaaggctgaggcaggaggatcacttgagtccaggagtttgagaccaagggaaagaaaagaaaagaagctttcatttagccaggcatgctggcacatacctgtagtttcagctactcaggaggttgaggcataaggttcacttaaagttgagaggtaaaggctgcagtgagccctgatcacgccactgctctccagcctgtgacagagagagaccctgtctcaaaaacgagaaagaaagaaaaaaagaggcaactcaagaactcaggaatacttgcaggatctcataacatatgctatacaaaatcaattaaaataatatttaaatgctgaaagaaatgagcagctcccagggtgatacagggtggtttcacttcttggacacatctacactgagctctattcctggcaatacctgatgttcccataccccagatttctttattttattttgagacggagttttgctcttcttgcccaggctggagtgcaatggcgggatcttggctcaccgcaatctccgcctcctgggttcaagggattaccctgcctcagcctcccgagtagctgggattacaggcgcacgccaccatgcccagctaatttttgtatttttagtagaggcagggtttctccatgttggtcaggctggtcttgaactcccaacctcaggtaatctgcccgcttcggcctcccaaagtgctgggattacaggcgtgagcgggcccagcccctataccccagatttctgcaagtggcaacaccactggcttcattttgctggtggcccctctggccttcccttgtatatatcacctttgcccaaagaccatgtcagccaagggactgctctcacagctccaggaatcctcccctttcaggaaatttgaggcagttgagggcatgaaagtaaataagctgagctcatcagaggccttgtattgtggtggttaaaagagccagttctaggactagaaagcctggcttgaaatcccagctctgccactccctagtggtgtgactttagcaagttcctttacctcttttgtacctcccttttctcacctgtaagatatgggtgataatagtttaatatttgttttgttgttgtgaggattaaaggtgttaatgcaagtaaaccacttagaaccacagcacatagaatatctcagtaaggtggttagttttttttattgttgttttcagagatgctgtgatttctccaaagtggctgtgatggctcggcaggctcctgaccctctctgctcccacatgcctccaccctcatcctgatctcccatccagcttttgacagcttgcttggtgctggacaattgcacacatcttaccacccccaaatcctgcccagaagcatcttgtgcataactctcctacctgaatatgcaacagggagaaagagcgtcccaggacattttaggtttttgaagaaaaaaaaacccctttggtaaaaagccagagatccacagcggccactttttccatgggattgacccctgcaatcttgactttcaaccacacagcaccagagtagccaaacattgcttgtgtccaaacgctggctgccttgaagggtgaaagaataagcagttcccaaactcagctgaccttaatgtccttctagctccttacgcccatctcggacaaaagcagaaatgtatgtctcagttgtgtttctaccccttgctgcccaatataaatttttgtgttgcccaatataattttttgtgacgatggaaatgttctgtatttgtgttgtctgatgagataaccactaactgtagtgctattgagcatttgaaacatggctagtgtaatcaatgaaccaaatttttaattttatttaattgtaattaattttaagtggccacatgcagggagtgactgctgcattggacagcacggctctaaattgagccttttttccttatttggtgaggcatacttgccttaagattgggaagtctatttttggaacctgctaccaatgctggtctcacacttgcaattctcagctgagccaagaggtgagagaaaggtcattttccattccagatctcactctcccctgtgacactgaggaaactggcaagtgatgtgaaggctggagagcgtgtcctgtatgctggctctgtcccttctgcctgtgttgactgacatagttagttgctgcccttgctggtctcccttcctccaaccttgcctctctgagcacacctgacattcatctcatgacttccctaaaaacattctttgggaacaagaaactaacaaatcccaagtgacctatcacatatacaaacatacagggcagagtttggattcgcggtagaagaaagggaggttagacattaagaagaatggtctggtgatgacagttgtgagataatagaaacaggaaaaagaaatctaagttttctttctttttttaagaaccaataataatttctctcttttgactagtcagtagggctggggtggattggaggaagcttacatattccatgaacaagcctcttcctaaggtcctgtaagtgatcctgccccactgattagcccctagaagacccttcaaaggttggatctccaggagggagtgggggaggaaagccctgtaccaggcagcctctgctccattgctctgggggggtggggaaggcaaaccctggtcatcccctcagtctgtagcccttttgtgtgagtgcctggcaagggtgacgtggggctgtttctgcgggcacagctgcagcaattaccggagtggaggcagggcccaggcagcactgccctccaagatcttcccttgggcttttcagcagtaaggggacatgcaccccaagggcctccacttggcctgaccttgctgcgggggctctctgtccccaggaacagtagagatggcaagcttatcgagaccctctctgcccagctgcctctgctccttcctcctcctcctcctcctccaagtgtcttccagctatgcaggtaagacatgttttttttcctgccctggggagaccctgaaaacagaaaggctagtttcctggggcttagctccttcaaacatcctcaagttgctatattatctttctaaaacatagacctactgacatgcctcccttcctcagaaaccttccgtgggtggttcttacagccttcaagatggagtccagactcttttttttttttgagacagagtctccctctgttgctcaggctggagtgcagtggcatgatctcggctcactgcaacctcagcctccctggttcaagcgattctcctgacttggcctcccaagtagcggagactacaggcgcctgccaccacacccagctaaattttttcttttcttttttttttttttttttttgtattttagtacagacggggtttcacatgttggccaggatggtctcgatctcttgacctgctgatccgcccgcctcagcttcccaaagtactgggattatgggcgtgagccactgcactaggcctaatttttttatttttagtagagatggggtttcaccatgttggccaggctggtctggaacccctgacctcaagtggtctgccctcctcagcctcccaaagtgctgagattataggcatgagccattgcgtctgacccagactccttaatgtgactaactcaaggctttccttgaactacttcttacttgtctttccagctttgtcttttcacctctcaaattgagataaaataataacaacctcttggagttctcatcaggattacatgaaatgagatatgtaacatgcttagcagtgcctgtccatagtaaatctcaataaatgtttgtggaattataatatcttgtcatgtttgagactttgctctgcataatcaggcaccagtaggtttttataaaggaacccggctgtcacgtgcagaggagaaataaacagaaagtttcccatcctcagggagccacctgactgacagaggcacagtgcatccactctccaggtctaggggagaaagcagccttatttcttagtagctcagaatctgacttgagaaacacatccacatagaaaaaaacaaggaactttttcgggtcagggtccgggagccacagtgaggtggaagatacaggggaaggaagagggaaatagagccatccccagggtggaagatctcagaagagaatttgggaaacaaggtatgaacaaggactgaatagtgagaagtgatggagagacagttaaagtagatggagtgacaaaagcaaaacctctaagggtagaataggcagcaatttggccaagtcctaacagggaggcccataggaggattcaacctcaagatgctgtgccacattccaagagggaacctaaaggctgggctgaagagtcagagatggctacagctggcaaaaagatgggcagatgctgagaggagatgattgctaaaatgttctgtccaggacattcacagtatctctataaccagagtcttttttgtcgttgttgttctcaagaaggaaacttgaggccgggtgtggtggtttatgcccataatcccagcgctttggggccaaggcaggcggatcacctgaggtcaggagttcgagaccagcctggccaacagtgtgaaacctcatctttactaaaaatacaaaaattagctggatgcggcggtaggtgcctgtaatgccagctactcgggaggctgaggcaggagaatcacttgaacctgggaggcggaggttgcagggaggcggaggttgcagtgagccaagattgcaccactgcactccagcctgggcgacagagagtaagactgtctcaaaaaataaatgaataaataaaaaggaagaagaagaagaagaagaagaattgcaatcctccctggctctagaatgtcatttaaaagtcgagtgtcttcttccttccctgttttgaagcagcccttctcatgacaggcttgcttgccaaggttccctctgaccttaaatctcttccttttggtgtcttggacagggcagttcagagtgataggaccaagacaccctatccgggctctggtcggggatgaagtggaattgccatgtcgcatatctcctgggaagaacgctacaggcatggaggtggggtggtaccgcccccccttctctagggtggttcatctctacagaaatggcaaggaccaagatggagaccaggcacctgaatatcggggccggacagagctgctgaaagatgctattggtgagggaaaggtgactctcaggatccggaatgtaaggttctcagatgaaggaggtttcacctgcttcttccgagatcattcttaccaagaggaggcagcaatggaattgaaagtagaaggtgagtagtgccatataatattaggtattaactgttgggtggccaagaacaattattctctcaactgagatgagatccctcaacccaaacatctcagtcctgggaatgatttccataaaaatgtacacatcaataaacagaaactcatgcttagggatgtctgttgcatcattattcagagtagcaaggaaattgggatcaaaatcaatgcctttgagtaggtaagtgacagaatgaacaatggtagccatactgtgaatattatgcaggcattaaaaagattattttagcactaggccagatggtttggaggccttctataaggtattattgagtgataagagcaagctgctgtaggatacaaaaacaaaaacaaaaccctagggcatggtggtttgcctcgcagctactcaggaggctgagacgggaggctggcttgagcccaggggtttgcagttacagtgagctatgattgcaccactgcactccaacccgggtgacagagcaaagaccttcacccccactccctacccgtctctaaaaaaaacaaaaacaaaaacaaaaaaacccttgggcccagcgccgtggctcacgcctgtaatcccagcactgtgggaggccgaggtgggcagatcacaaggtcaggagatcgagaccatcctggctaaaacggtgaaaccccgtctctactaaaaatacaaaaaaaaaaaaaaaattagccaggcatggtagcaggcgcctgtagtcccagctactcgggaggctgaggcaggagaatggcgtgaacccggaagcggaggttgcagtgagccaaaatccttccactgcactccagcatgggggacacagcgagactccatctcaaaaaaaaaaaaaaaaccctgtatttgtgagcgcacacacacacacacacacacacacacctgtgcttggtcctagtgaataagcaagtaaatcaaatgtctaaatataattatagaaaggagatgtcaccttttggctgtacctccactatttcattctgcagaattgcagaatttcttttttttttcctttctttcttttctttttttttttgacacagagtctcgctctgtcacccaggctggagtgcaatggcgccctccgcctcctgggttcaagtgattctcctgcctcagcctcccgagtagctgggattacaggtgcccaccaccacacccagctaatttttgtatttttagtagagacagggtttcaccaggttgtcaaggctggtctcaaactcctgacctcaggtgatccactcgcctcagcctcccaaagtgctgggattacaggcatgagccatggtgcccggcctcagaatttcattttcaacatgttttgcatgatgggtgattttggagaatattttttgctctatcgcaggatgattaagatgtggacaaggtgaagcggatggagggggagctttgaaagttacttgctatttaattgaggaactaaactgctttgagagcctgggggtcagatcctctgccttttcctcctccccacctgcagtgcaaacatcagacaattgatcactattgtatcttggaggtgggagtgaccattgcagtgctgggaccagaagatggcattgtatgtggaacaacaaagcactatttctagagactgcctgcagggatatggaaatagctttatgtgtctcagaatgttcttcatacagctgtttttattggggaaattctacttgccgaaaagtttgatagtgagaccctctccagtttgcagatttttctccttcctgctcaacaacttcctagctcagtaactgcctctcccaacaaactccctcagtttcaccacaccaaaaaaggaagacaagccggttgcggtggctcacacctataatcccaaaactttgggaggccgaggcgggtggatcacctgaggtcgggagttcgagactagcctgaccaacatggagaaaccctgtctctactaaaaatacaaaattagcctggcgtggtggcgcattcctgtaatcccagctgggaggctgaggcaggagaatcgcttgaaccccggaggcggaggttgcagtgagccaagatcatgccattacactccagtctgggcaagaaaagtggaactccatctcaaaaaaaaaaaaaaaaaaaaaacaaggaagacaaaaagaaaagcagctaaagactttgcctcaggggagaaagttctcttttgggttgctatccacattccaacctcctgttcccacctcttcgtctgcatgcctaagaaactgttttacaagtaaataagggacgctttgtctaggcttcggagccaggaagttgagacaaatttaggaatgagatgaagtaatggtattattgcaagtctcaggtgtaactacctctgctctttctctgaagagtttctaatttctcttgtttacttatttttttcttgtcatttttgtgattttattactagttgtctctaatcctttctttaaattcttcattttgaaacataaaaacaaatgccaggcgcggcagctcacgcctgtaatcccagcactttgggaggccgaagcgggcagatcacccgaggtcaggagttcgagaccagcctgatcaacatggagaaaccccgtctctactaaaaaatacaaaattagctaggcgtggtggcacatgccagtaatcccagctacttgagagactgaggcaggagaatcgcttgaaccgggaggcagaggttgcggtgagccaagatcgcgccattgcactccagcctgggcaacaagagcaaaactctgtctcaaaaaaaaaaaaaccacatacaaaccagagataatattataatgagcctccaagtgcctaccaccttgctgcagcacttgtcaatccagggaccacccacttcaccagctccccactcattaccaccctcccctactcaattactgaggtaaatcctaggcagcatgatcatttcttttttttctttttatttattttgagacaggatctgtctctgtcacccaggctggagtgtagtggcatatctctgctcactgcagcctctgcctcccgggcagaagccatcctcccacctcagcctacatagtagctgggaccacaggcacacaccaccacacactgctaatgttttgtattttttgtagagactgggttttaccatgttgatcaggctggtctcaaactcctaggctcaagcaatcctcccacctcggcctcccaaagtgctagaattacaggcgcgagccactgcacccagcgaagaacactttttaaaaaataaataggccgggcgcggtggctcacacccgtaatcccagtactttgggagcccaaggagggcgaatcatgaggtcaagagattgagaccatcctagctaacatggtgaaaccccatttctactaaaaatacaaaaacaaaattagcctggcgtggtggcaggcgcctgtagtcccagctacttgggagctgaggcaggagaatggagtgaacccgggaggcggagcttgcagtgagctgagatcatgccactgcactccagcctggggcaacagagtgagactcaaaaaaaaaaaaaaaaaaagccccccctccccacacacaataatataaataaataaataaccacaatactattatcacatcttacaaactcaacaaaaatttcttaatatcatcaaatacccagtttgtgttcaaattttcctgattgtttcataaatatactcttacagttggtttcttttagcgagattcaaatgagacccacctgttgacctttgcccttagggtttcccagggtctgaattttgttgacgacattcccatgttgctatgtaatacggtcctccatgccctgtgtttttctgtaaactgatagatgtggaggtgcaatgacatttgtgtttgatttactttggcaaatatagttcatcagtgatactctatacttcttgttgctttacatccggaggctgataatgtctgcttttctctcttttctaattatttgtgaaaggaaaaatgtggggggttgggagaaaaaaacccttaagtacatactcgctaaatcacattgctacaggtaacttccattaagaacttgaaagcaaaggtagctgcattttcccctagggaacacaatgatagccaggagccttagtctacagcttgaaggattgtaattatacctaagcaaccctcctggaccaatttaatgttattagctgtgatgtatccctacctttgatgtcattatccttacttagctcccttaaagcagagatcaagatgaaaagggcttcagctgcagcatggcacatggagattagagtggggcttttggatgctgaggagcagacctagaatgggaaatagatgggagccacagaagtgaaggtccccctccctcattgctcaacctactccacatctccaggtctgcacatctgttcagttactgaatcctgtgtaagctaccttctttttcttttttcttttatttatttatttttttttttttgagatggagttttgctcttgttacccaggctggagtgcaatggtgcaatctcggctcactgcaccctccaactcccaggttcatgcaattctcctccctcagccttccaagtagctgggattacaggctgcaccaccatgtctggctaatttttgtattatcagtagagagagggtttcaccatgttggccaagccggtctcgaactcctgacctcaagtgatccacccaccttggcctcccaaaatgctgggattacaggtgtgagccaccatgcccgctgtaaactaccttcttaaaagctctagaagagggctcttaaccttttgttgtgtgtcatgcaccttccacaagctgatgaagttgatagaccccatctcagaatttttttttttttttgagacagtgtctcactctgtcacccaggattggttgcagtggcacgatcatggctcattgcagcctccacctcccaggctcaagtgatcctcctgactcagcctcttgaatagctgagaccacaggcttgtgtcaccatgcccaggtaatttttaattttttttcatagaggcagggtctcacattgtgttgcccagtctggcctcgagaactcctgggctcaagcaatcttcctgccttggcctcccaaagtggtgggattacaggggagagccaccacacctagccagaagaatgttttaaatacaccaaataaaacatttataccaaaatacagttatcaaaatattaaattaacaagagttagggtgaccctattaattagtgtaatttcaaaatagtaatgaacataagtgatagtttgagatttctgtgacttttctaatgtgacgtgaaaatatttgtgatttttctttttcttttttttttttgagatggagtttcgctcttgttgcccaggttggagtgcaatggcaagatctcggctcacctcaacctccgcctcctgggttcaagcgattctcctgcctcagcctcttgagtagctgggattacaggaatgtgccaccacgtccagctaattttgtatttttagtagaaacagggtttctccatgttggtcaggctggtcttgaactcccaacctcaggcgatccgcccgcctcggcctcccaaagtgctgggattacaggtgtgagccaccgcacctggccaatatttgtgatttttattgacgacaaagtcaaaggttctcttcatataattgtgttgtatcgcctacaagcataattaaaataaacactaaatttcagtttaaagtttactgaaaataaatatgtattttttattccctatttaagctttgaatcccctgacttcctataccattaccactgtcctagttcaggttcatgttgttttttactttaattgttatcacagtctcttaacatttctccctatgttctccagtcctgtaggtgctaaatctgacgtggtcacttctcagcttggaatccttcagtgcaccaccacagccttgaactaggacagtggtaaaggtataggaagtcaggggattcaaagcttaaatagggaataaaaaatacatatttattttcagtaaactttaaactgaaatttagtgtttattttaattatgcttgtaggcgatacaccacaataatatgaagagaacctttgactttgtcgtcaataaaaagtcccttgagggacttcagatctaagtcccttagctgctcattaaaactcccccagcctgacccaatacacaatcttgactttaaaccacttgtcattctaaatcactagcatttcctggaaaaaaagccatttttccttcagggctaagctcagggaccaattctgtgtcaccttctttgaatcctgatgatattcacttctttatttgacctgatttattgggccccagacaccatgctgagtgttggggattcagctctggacaatgtcaaatgtcagtcctgcctttcagatcctttctactgggtgagccctggagtgctggttctcctcgcggtgctgcctgtgctcctcctgcagatcactgttggcctcgtcttcctctgcctgcagtacagactgagaggtacagggcagagggtgggtggatcaggatcctttctttaaatgagctggcttcttggagctacaccacttaacatgtatttgtgagtgacttctgggttcagaagttcttctcactattgagtgataaagaaaaaaaataactccatgatgaaagagttttacatcttacggaatgctttcatatgaataatcggacctagcatttccctatgagctaactatggcatatagtaaccccattttacagaggatacaactgaggccaggagtagttcagtgacttactcaaaccgatataacttataagtggtagagctgaggcctctgtatcatacctagcagctccatgcaacttgggagagtgtgagcttcaaagtcagacaggtctaggctattaggagttttgaataaagatactgaagtgaaagtctctaccacacagtaggcgttcgaaaattgtttcctccttctccattcaacactgaggactcaggttcagctgctgatgaagctcctcttttttgcctagagctttcattctgagccttctcctcctaccaagtgtctccccagtgccagagcaggaagagtcttcactcctccccatgccccacctcccatttgttactaagaggagaggagaaagtagcaaggagggtatggggaatgttttgggggaatgggtgttggtgcgatcaacaacaaagtcctttctctcaccttgaattcatcccagatgcctgcttgtttacttcttccacacaaaaaaaggccttcagccctcatggctgagcagaaagaatctgaatgttagagtcaggcagcctgggtttgaattccatctcaggtactgaactctatagcaaaattcttagattctccgagcttcagttgccttgtctgtcaaatagagaaaacatcctccctcctaaattgtagggaggattaaagtcatgcaaagtgcctactacaaatccagtcacaaagtagctagctactcactaaatgttcagctcctccctcctcattcagatgggaagtggctttagataaacaaagtggcaacgcagtgggctggagcagctctgtgaactgagaatccaagaaaaggggcgaagagcagctgggatgtattggatgcttgtgctggcttggagcattgctcacattctttattcgctattgtatctagactatagctagagaaagagccgcaaccattggctttaaatccagtgctcttcctactctcctgaggttgtttccaggctgcagagaaatagcctgcacaaggggcccaggcgctgggtgtgggagggtccccaccgagagccagaacatgcaggaactaaaatgttgcctttttctattttaggaaaacttcgagcagagataggtgagttccagtcatcgtttctcccaattcttgccttttggttttttggcataacggaaatggtcccgttcttggatcgtctctccctctcaataccctgttttcccctcagtttccctttctctacagtgggtgtgtcgtgcctagaacaagttttaagtaattaaataacaaagactcaggataaaagatcctttttgagtgccctactaaatccatttccatttgtttctctttcagagaatctccaccggacttttggtaagttccggcatgtctaggccctcccaggtcaacttggtatttcactctagttccagtcacctgggggaacaaggacccctggctcctggttgagtcccttcctctcttctcttttctttctttaaataagaagtcatttgcatttaggattggtaaaatcataataaaaatactcatgtactgtttttatgtgccaggcactattctaactactttacaaaaacgttatcttattctgtttaactccttatgcacatgatctctcttttcaggaatggcaaaacagaggtaaatagatcgtttacacgtaaacctgatgtctggttggggaggtgaaacaaacagaaacaagacacaactgtatcacctgtacttatatttctgctttacaaactcaggatgtttccatgagtacagaacatgactaatcagagaagacctcatagaggaatagaaaagccaccaagccccactaggaattgacccctcaaggacatggtttctagcctttttgttcactgcagattgcccaatgcctaaagataatggcaacagaagagcacccaaatatttgttagataaatgttgcagacactagaaggtgtcattagggcacagatggtaccttctctgagcaaacttccttcacagctcctcctcccgaggctgtaggtgactctactcttgtcacctggcacacagagttctatcgtacgatttaggaaattagaccagtgtgtggaccacacacacacacatctttacacacccaaagaggaggaatagtatctttgttttggaggacttgactatgaaaggtcttaactcctttttgtaccatgaatctctctggcactccagtgaagtctaaaggacccctttgcagaatgtttttaaatatacacataaaatagaacacataggattgcaaaaacaatcattgtactaaaatacagttatcaaccgataatcacatttgtgatatagtaacataaatgtttctttttttttttttttgaggcagagttttgctcttgtcacccaggctggagtgcaatggcgcgatctaggctcactgaaacctctgcctcccgggttcaagcgattctcagcctcctgagtagctgggattacaggtgcccgccaccacacccagctaatttttgtatttttagtagagactaggtttcaccaggttggccaggctggcctcgaactcctgacctcaggtgatccacctgccttggcctcccaaagtgctgggattacgggcatgagccaccgtgcccggccataaatatttctttagccaaagtaatacattaagtaatgtagcagcaagtctaataacctgtaatttctttctttctttctttctttctttttttttgagatgaagtttttttgagatggagtgcaatggcacaatctcggctcactgcaacctccacctcctgggttcaagcgattctcctgcctcagcctcccaagttgctggaactacaggcgcatgccaccatgcccagctaatttttgtatttttagtagagacggggtttcaccatgttggccaggctggtcttgaacccctgacctcaggtgatctgcctgccttggccttccaaagtgctgggattacaggcatgagccaccaggcccagcccaataacctttaatttcaacatactaataaacataaacagtatttcaagatttctgcaataactctaatgggaatgaaaacatctgtggcttccattggtaattaagtcacaggtactgctcatattgtggttagttgtaaaatgttttggtttgttttgttttttccaagacttgggggaatgggtgttggtgggatcaacaagagtcttgctctgtggcccaggctggagtgcaggggcaggatcttggctcactgcaacctccgcctcccaggttcaagcgattctcctgcctcagcctcctgagtagctggcattacaggcatgtgccaccacgcccagctaatttttacatttttagtagagatggggtttcaccatgttggcctggctggtcttgaactcttggcctcatgatccacccgtctcggactcccagagtgttgggattacaggcatgagccaccacacctggcagttgttacatttttaatgaaagaaaatgttaaatccagttattgaaaataaggaggcagtacttttctcatccaagttcatggactttctgaattttgtccccagagtcctttggtgttctaggaccccaggttaaggaaccaaaaaagacaggtgggtggggcatgagggggaacacatgttaaccctgtttgttctggtgaacaattcagatccccactttctgagggtgccctgctggaagataaccctgtttgtaattgtgccggttcttggacccttggttgccttgatcatctgctacaactggctacatcgaagactagcaggtgcagtggctgggcagcaggcaagaccaccaaatagtgggggaccaagtcagctctgaatgggaagccaaaagagaatagaaccaggactcaagattaggggagctgggatttccttattcctctgtccccatgcccaaccccaggctcttctgagaaactgtgaagagaaccacttactggatctgtgggatcccccagtggaaagggcagtgtgggtcactccaaatgtccatagggaggatgtgggaaaggtgctattcatcttccactaatcacatatttgtttctttttgttttcagggcaattccttgaagagctacgtaagttctcttctctctgttataagcagagaataaaaagccaggaaagggagacagaagcaacaagaggaagaggcgggctattgagggatcacattcccagaggaaaggaggagctggagagcctgggtggagggaagactcctcctgggaggtagagggcaaagaagccagctgttagagacacatttacaggtggcagagaagctggaggcactcctatctgccacctgatccattcctccttcactgcccctaagcaggaatccaaccctagctggtctcattgcccattccacagcaactgcccagtgcctcacctctcagatcaaccattgaggcaggaatggagacaagatgaccccaagggcttttcttctccctagttcaatggttttatgatacaaactactgacatacgtttttcaagttattttctccttcttctaggaaatcccttctgagtgatgtcacatcttggcaggggtggaggagagcctggttgcccagggatttgtccttggggacatctcatccatcaagttgcacactcactggcatctttgctatggggacattccaatttgcactttcaggaacactctgaattccaagtagaattgatttcccttcttctgtcatctaccttttctcttcattttcccatttttattacccttctttccatttctctctccagtcttccacctggaagccctctctggctaaggacaggcaggtgcccctctctccatcagaggacacctgtactggagagcaacacaggatggtctctgccatgaactggaggccaggaatctcctcactgaaaattacagtatggtaactttgcaaatggtggttgtttcttccaagactccagccctgattgcgcaaaactgaaaggcatgtgaagggaaggaagaggaagagtgcaaaacattgaagagagagctgagtgagctgaagagtgaggatatgagtagccccaacccaaacctggagatggggagaaacctacagaatactagccagagctcctccttgtcttggcagcctactagggacctggggaagcaaaaacgaaagctgggcaacatgcctgctttagaatgttttccttctacttacacatcttccacaggtctcagaatctttccttcctctcatccttttctcctatcttcatatctatcagagtatccactgtttattcaacaactactacttgatggtcagacacaaacaaacaagctaggtgctaattaataaagatacgagttttggccgggtgcggtggctcacgcctgtaatcccagcactttgggaggccgaggcgggcgaatcacgaggtcaggagttcaagaccagcctggccaacatggtgaaaccccatctctactaaaaatacaaacaattaactgagcatagtggtgggcacctataataccagctactccggaggctgaggcaggagaatcgcttgaacccaggaggcagaggttgcagtgagctgagatcgcgccactgcactctagccggagtgacagagtaagactctgtctcaaaaataaataaataaataaataaataaataaataaataaataaataaataaataaaaaataataatacaagttttcataagcacacttctaaccccttgtcttttatgtatttccttccttatccacgcacctgtctccctctactccagcctcattaccccagaggtcagtcctcaggaaaactaaacacaaagaaagagctcagtcagaaaggccatttatttatgtttcaagatgctcactgcctcctttgttttgtctcctttgcaggccttctctcttaggcctcttctcctgggggtatggatcctggggggagattgatcacctccatgcttccattcctccccagccatagtggggacatcatgagagaagccaagccactggcccaggatcacccggcatttatggtggctgctctggcacaggtccttgcctttatagcccctccagtgatccataaggccctctttctccccaaaggagaggtcacagatagggcaaaggtagctcttctgcttccagtgggtctgctggtgtctgaccagcctggaaaatgagctgaaagacttgctgcaatggaagcagtagttgggcggctctgtgaggtgggccttctggtgtctggagagataggatttcttgctaaaagtcaaagaacaatgggggcaacagaagacattgagtcttgagggcttcactggatgagagttggatctggcaacctgacagagggttccagtgatgggtgcctgggtcctggtcacaggtgcttggttcttaagtacagatgcctggttctgggccataggaccctcagttctaaatatgggttcctgggacctggccactggtgcatggttcacatccaaaagcccctggatggacctctggcttctggcgatgggtgtctggaattcagcctgggtgcctggaatcctcaaagtacactcctggtttccatccactggctcctggttttggtgtatcttctggtggcgtttgagctcagactggtcccggaagctcttcccacacacagagcatgaatggggccggtaacccagatggacgcggcggtgacgacttagtccagaagcatcacagtaggtcttgtcacagagcgtgcaacagaagggcctctccccaagatgcatgcgtctgtgatagctgagggacttggggctccgaaacaacttcccacactgactgcagctgttagtcagcttgggattgtgaacaaactggtggctatagaggtaggagcgcctgctgaaacatttgccacaggtgtagcaaaaaaagggtggcccagcctgggatgcttgaagcacccgggtcctgtccatagtcccagctggggcagatagggggcactggccggcccctctgcatgcaaggaagaccttgtcatcactagtcccctcatctctcagactgggatgttgttctcgaagctctttcttcttgccttctacagtgaatgaggaagaataacacaaaattcactgtaagaactccaacagaggcttggcatggtggctcacacctgtaatcccagcactttgggaggccgaggccagcggatcacctgaggttaggagttcgaaaccagcctgaccaacatggtgaaaccctgtctctactacaaatacaaaaattagctgggcgtcatggcatctgcctgtaatctcagctactagggagactgaggcaggacaatcactcgaacccgggaggcggaggttgcagtgagccaagatggtgccactgcactcctgcctgggcaactagagtgaaactctgtctcaaaaaaaaaaaaagaaagaaagaaaaagaagaagaagaaggagaaggagaagaaggagaaggagaagagaaggagaagaagaagaagaaggaagaagaagaagaagaaaagaaaagaagacgaagacgaagaagaagaagaagaggaagaagaagaactccaacacagcactccattcagcctaacacacttcttgtctctgcccttgctctcccacccaacacattcatccttacccttgggcctcataggctagaaataagaagaaaaaaagaaaaaattggcttttcaaattagaagcaaataaaaatttaactggaatctttcaacactgtcagaaatgtaaattttaacttacaacaacacttcttgaaatctatcttatctcattctcaatattgctcaaactcccatagacaatccacagacacccacataataatgcatcatgaacactgggccacttgagggtgaaaagaggtgttattaataatcaagctgggatgagaagtataaaccaggactgtcctggaaaaccaaaaagtgtatccgcctggcttgatatctctctcaactatttactaccagggacaagcctcccttactccaacccagcatgaaacctatctcctttgcttctcttttctcttggaaagaacattttaatcagagcactatcatggacataagcaactttcatgtcatctctcaatctctagaaactgaagacatctacttctcctgaaagacttagatcttcagccagccaggcacggtggctcatgcctgtaatcccagcactttgggaggccgaggtggatggataacctgaggtcaagacatcaagaccatcctggccaacatggtgaaaccctgtctctactaaaaatacaaaaattatctggacacggtggcacatgcctgtagtcccagctactcgagaggctgaggcaggagaatcgcttgaacccgggaagtggaggttgcagtaagccaagattgtgccactgcactccagcctggcaacagagcgagactgtgtctcaaaaaaaaaaaaaaaaaaaaagagagagagagagagagacttggatcttcaacttgaaaacttgaagtcaagggacttgagcctatgatattaagctctctttcaactccaagtctgaccaggctggacagaggtacactaggagagcatctatagagcattcatcctcttcatcagctctccatcctttcaggggttatcctgggcccttttccccttcctccctgcttggcaattcttacctgaaaggccttctgtgtttgggagatggacaaactctctccactgttcctcttcttgctcaagcttggtgattagctctggcttatgcagaaagattctggctgatgtgtgggaatgagaaagcgttgagttggtcccaggtatggccccttcacatctgatggggacaacaggctacctcctgtagcctttgtttaagaaccataacctgggacatgtagatgcggaaaggagacattaaaaggccagctgctagcaaagtacctggttctcaggagtgacttagtaaatatttgtttgatgaatggaaaaatttgcatattttgagaacactgtcatcatgttacaagtgttatctttgccttcatgcaggctatcatttcttctctttaccactgagcttagtgactcagatctttcacacctggaaagcatagaaccaggggtcagtgaaactaattgtaagctgatctacctgtccagggaaaccagatgttccagggcccttaggacagggggcttgctgagggaagcccagcctcttacccacagatgttagattcttaaaggtttccgacataacatcctggtaaaggaccctctggctggcatctagacagtcccactcttcctgggtgaaattcactgccacatcctcaaaggtgactggcttctggaagaacaggagagactcaagaagtttatataaatatgtgtgtgtgtgtgtgtgtgtgtgtgtgtgtgtgtgtgtgtgtgtgtgtacaagattaacatccagtctcaagattcagagaattaaaacctaagagaaagataaaaccatggaaggaagagagaaatattaaaagacagacacaaggccagcaactgtgaagtatagaaaggaaaggaggccggatgcggtggctcacgcctgtaatcccagcactttgggaggctgaggcaggcagatcacgaggtcgggagttcgagaccagcctgaccaatatggtgaaacctggtctctgctaaaaacacaaaaattagctgggcatggtggcgcatgcctgtaatcccagctactcaggaggctgaggcaggagaattgcttgagccccggaggcagaggtagcagtgagccaagatcgcgccactgcactccagcctgggtgacagagcgagactccgtctcaaaaaaaaaaaaaaaagaaaaaaaataaaggaaaggaaagatgaagagaaagggagaaagataagatgtgggggagaggaaagaggatatgcagatatgcagaatataaacaggaaagcaaagcgaaggaaaaaatgctgccactctaacaaatttcaggaagtactccatgaaggatgccaggatggtgtgggagatggagaaaggtcttgcagctcctttttctggatgtcgttcagtctggaacaatctgagatttcatttgacctgcaggcaggagtatgtatgaaagagctcctggagtccaggacctggaccccatctctctctagcttagtctcctcaccttcttcacccgtgcctccctccagcaatctctcttcatggcttcctgcagggtggcagctacctcgcccacccatgggagcgtcttctgtacaggttcgattggcttcagctgttcaaacatcttctcttctgtggtgtctctttctagctttatccactcctggcctggtgcccaggcctgactggattccttcctggggctatctacctcccagtaactgggcagatggagaggcccagcaaaggccccagggtttgatgtggcttcctgtgacaaatgtatctgctccaagaggctgtcttccttttttgttctgctgtccaaattctcctcttccacaattgagaacaattttgcttccctcaaagctgggccacagagttcagggccctggtcacccttggctcaccagctgccattgtttagtaacaacaccagcctgggctaggtgtctgccctctgttctaccctgcttctagaaacctgaggtcagagaaaaacaaaacatatcagcaagagggagggtaagaaacagcttccttatttggtcagggaatgccagcagttactaaacccctacagtgtgccactggatgctctcagcaatgaggtaacaattactggccctgtcttaaggacctaatgcagagatgctaaataattttccaaggacaagtggacattcttgatctacaaaagttaatgtttaaacctaatgttaatgttagactcagtaccattggaaatcatgtagctggggtaaccaggctaggatctgtcacagatcacctcgagtgagtctctttattctttctgacttggtttcatcagaaatgtgagaataaaggagacactctctaagatctcttccatgaccaaaattatacacacacacacacacacacacacacacacacaattatgtgatctggattttcaatacatgtagtagttcccctttatcatggttttgcttttcaatgcttcagttacccatggtcaaccatggttcaaaaatattaaatgaaaaattccggaggacaggcacagtggctcacacctgtaatcccagcattttgggaggctgaggtaggcagatcatctgaggtcaggggttcgagatcagcctggtcaacatggtgaaaccctgtctctactaaaaatacaaaaagaaaatagctgggcatagtggcacacatctgtaatcccagcaactcaggaggctgaggcaggagaatcacttgaaccctggaggtggacgttgccatgagccaagactgtgccactgcactccagcctggaacatagagcgagactccgtctcaaaaaaaaatccagagataaacaattcctaagttttaaattgcttgacattctgagtagtgtgatgaaatcttgtaccttttctctctggcctgcccaggatgtgaatcatccctttgactagcatatccacactgcagacaatacctgcccattagttccttagtagctagccatctcagttatcaggttgactactgtagtatagcagttgcctgtgctcaagaatgccttattttacttaataatgacccaaaagcacaagagtagagacgctggaaattcagatatgcaaagagaagccataaaataaaaaggtaaaaattcttgtcttaaggaaagaaaaaataatcatatgctgaggttgctaagatttacaatataaattattttgagagagataccacattcatacaacttttattacaatatattgctgtaattgttctatcttattactagttattgttgtcaatctcttaccatgcctaatttgtaaattaaactttatcattattatgtatgtatagaaaaagaaaaccatagtgtatacagggtttggtactattcatggtttcaaagtatccactggggtggggcgcggtggatcacttcagggcaggaatttgagaccagcctggccaacatggtgaaaccccgtctctactgaaaatacaaaaattagctgggcgtggtggcacgctgtagtcccagctgctcaggatgctgaggcagaattacttgaacccgtgaggtgaaggttgcagtgagccaagactgtgccactgtactccagcctgggtgacagagcgagattctgcctcaaacaacaacaaaaaccaaagtatccactagagctcttggaacatatcacctgtggataaggggaaccactgtatacacagatctttgtgaagaatactgctaacaacccaagagcaatcacttattcagggctcacaatgagcccagcactggagttccctgctcatccttggaaatttcctgctcagatgcaaacatagctgaactctcaccttttcctgctgacagccactcacccacatctcccttactagagatagaaagaaaagaataaagaccaaaaaaccctgttgactattttttcctttcactttttgagaagtgttaatagaactgaaaataccagcaaggaaaaacgccctcgaggaatagagttaattggatctccaaaatgttgtcatgaaaggtgcattcctgggatatgaatttgatttccttcctttcttcctctctatttctttcctctctctccctttcctttcctgtctttcaaaaccattcgcactccttttatgaggcatgcagatcttggattattcttccactttccagccaactgcacttcaaaacagccttaataaggctgggcacggtggctcagcctgtaatcccaacacttggggaggccgaggcgggcggatcacctgaggtcaggagtttgagaccagcctgaccaacatggacctcgtctctactaaaaatacaaaattatcccggcgtggtggcgcatgcctgtaatcgcagctactagggaggctgaggcaggagaatcgcttgaacccgggaggcagaggttgcggtgagcggagatcgcgccattgcacaccagccagggaaacgagagtgaaactccgtctcaaaaacaaacaaacaaacaaacaaaaaacgccttagtaacagtgccctcaagaacctggccttccagttctctggcagagaagacctactgctgccgctagtcctcaagatggcatttgctggaggcggtaggcagaggccctaagtgtggattctaacccccgtggggactgaatctctgcggctgttgcttgcccaggcacgtttgcctcccatgaacttccttcatccacagggccccaaacctcatgccggcgggaggaggaaggagactgggcataactcatcagactttcgactgtaagagctggaggccgcctgcgggcttatctgtacccgggcctgtccccacccttccagaatgtaaatcctctgagggaatgtgtcgtcgccatctttcagtcctttgagtgcacccagtctctctccaacccaaaaccctttatccacggcaattgtgagaatgataagaatccccctcacccctcacaccgcaaacagttgcaatgcttagtgggattcacccttgtcgtcaccaaccctgctactccagccacgtgagttttccgcctgtcagccaagcaaaatggccttcctgcagtcgcacggccctttggtctctgctcagggcttcggggaccctttccagccattgccctgcacctacccaccagatcgccgccctggtgggcgctcctggccctgtcccccgcgcttagtttgtcattgcgcgcccagatccggaaccccagcctcgaagcttccggtggccgggaacaaagccggttttgctcactgttgcctggcaaagcaggcgcttgttagcacccactgaatacgcttatgtgctcagaaacggtcccattggttgggactaccttccccgatgcccatctgcccagaatcttccttctgggatgccgactttttcaacacgtgccaggagcccttcctcggcccggaatccccagagtgcccacagtggacagggcacctggatacaccccagactaacccacgtttccccggaggaccccagaggttggaagcccctccaagattaggggcgcagtgctcccctggcctgcggaagagtcagaggagtggggacaacattcaacatcagcctctactaccgctagcgcgactccccgccgccgctctactcacctgacgcgcgcagtggaccgcgatttaggggcacagggtctcccggggaccagcggctggagcgctccggccgagcacccgcagtcccggcgccgcggccccgccccggccccgccctcttccgctccctcccagtcatcaggccaccgagaatgtgccccttgacccagatgagagggtgagcccgccaaggtcaagcttcccatcctaagaatcacagacagcccggccatgcaccaccacttcgagcctccgaccaactgatagctgctggtcccaagtagcgctaggattttcgctttcccagtcttaattgactctaaaagaagaagaaaaaaaagcctgggcgcgattgctcacacctgtaattccggcactttgggaggtcgaggctggtgaattacctgaagtcaggagttcaagaccaccctggccaacatggcgaaacctcgtctctactaaaagtacaaaaattagccaggcgtggtggcgggcgcctgtaaccccagctactcaggaggctgaggcaggagaatcgcttgaatccgggaggtggaggttgcagtgagcccagatcacgccactgcactctagcctgggcaaaaagagtgaaactccatctcaaaaaaaaaaaaaaaaaaaaaaaaagaggaaagtacttacgaaaaaaaaaaaaagaccaaagtattatgattaaaacacgcggccgagagcggtggctcacacctgtaatcccagcactttgggaggctgagggggcggatcacctgaggtcagaagttcgacctcagcgtggccaatatggcgaaaccttgtccctattaaaaatacaaaagttagccggtggtggtgacgcacacctgtaatcccagctacttgggagacattgccgttactgggcaagtgttctttcaagagcatcttatctgaattactatagtactaaaaaatgtctaggctgggcccccgtggctcactcctggaatgctaacactttgggaagctgaggagggaggattgctggaggccaggagttcaagaccaacctgggcaacatagcaagaccctttctctagaaaaaatgaaaacaacttggccaggtgtggtagtacatgcctttagtcctaggtgcttaggaggttgaggtgggaggattgcttgagcccaggagtttgaggttacagtgagctatgattgcaccactgcattccagccttggcaatggagtgaggccctatttctaaacagaacaaaaaaaaagaatgcctgctgataaaccttgagacaggacattcatgaaggatgaagaaaagatttcttttatttttttatttttatttttttgagacagagtctcgctctgttgccccggctggagtgcagtggcgccatctcagctcactgcaacctccaactcctgagtagctgggattacaggtgcgtgccaccatacccggttaatttttttttttttttttttttttagtagacacagggtttcaccatgttggtcaggctggtctcaaactcctgacctcatgatctgcctgcctcagcctcccaaagtgctgggattacaggcgtgagccaccgcgcccggctagaaaagatttctttcttctttcttttttttttttttaattatactgtaagttttagggtacatatgcacaacatgccggttagttacatatgtatacatgtgccatgttggtgtgctgcatccataactcatcatttaacattagatatatctcctaatgctatccctccccactccctagaaaagatttcttgtggagtttttaaaaagtcctttgaaacaattcttttcttttctttttttttttttttttcgatacagagttttgctcttgttgcccaggctagagtgcaatggcatgatctcggctcaccgcaacctctgcctcccgggttcaagcgattctcctgcctcagcctcccaagtagctgggattacaggcatgcaccaccatgcctggctaattttgtatttttagtagagatggggtttctccatgttggtcaggctgttctcgaactcccgacctcaggtgatccacccacctcggcctcccaaagtgctgggattacaggcatgagctaccacgcccaacttaacaattcttacttcaaacatgtaagcatgacgttcctctccttcatgccttcctggccatttttttttttttttttttgagacagagtctcgcttcttcacctaggctagcgtgcaatggtgtgatcttggctcactgcaacctccacctcccaggttcaagcaattctcatgcctcagcctccccagtagctgggattacagccacatgccagcacgtccgactaatttttgtacttttagtagagatgggggtttcactatgtaggccaggctggtctcgaactcctgacctcaggtgatccgctcgcctcggcctcccaaagtgctgggattacaagcgtaagccaccgtgcctggcctggccctattttatctgggtctgacaaaagttatttcatcctagtatctgcaatttttccgcagaaaattacagagacgcacagtgaatgtgaaaggagggaaattaacaatagctattggcagagccaaacaaatcattacactttacctggatcatctgggagttgagatgttgagggtataaggaagtagcatgtcaatgcttgttaagaaagaatggcaacaactgtgctgccttacagatcagcaccttctgcagtctgcgagcccaaccttagatccatttgtaggcaacagtaaaaggtctcatattttcattgcagtgagccctgactgccatcaggaagatttggtcctctaggtaagatttccctgagacaaagtactatgggaaatcaagtgcatattcagcctcttagtactctgggttggtgttaccgtactgacgaaggcgatccattgatgaaaaacaaactgacctaaagaaatgtaaataaatgcttgcagtcagccctgttcctctgaaaaattcccctagcccttatgttgaaacctgatgagaactttaaaaatgttaacttggtaatggatggaatcctcctcattcaaggttacccctgtgcaagtcaagctcaagtcagcctgaaggtgcaaaccccatggactcagccagagcctatggctgtgggtgctagatccaaggccaaaactgatggcatcagccatcaggatgtttctgcccaatataaagtattgggtgggctgagaacactgaaagcttgccatgcagaaagaaactgaaagtaaatgcttgacttcaatggaacagaacttgtttctccctccatgctcccgatccctttagatccctttatctcacctcagccactttaagacaaaaggtgattagaggtgtagagaagttctaatgggatacattcatttgcagtagtcccccaaggtactgtgataggcagaattctaaagatgctttccccctcaaggttgcttcccctggttattcagtcaaatactaatcaaagtacagatgctcttcaatttaaaatggggttatgtttcaataaaaccattgtaactgataaatattttcaagtggaaaatgtatttaatgcacctaacctactgaatatattagctcagcctagcctaccttaaatgtgctcagaacatatttgcctacagttgggcaaaatcacttaacacaaatcccattgtatgataaagtgttgactatctcatgtaactggttgcatacagtacagtatagagtacagtatcagttgttaccatcataattgtgtggctgatgggagctgcagctcactactgctgtccagcaccgtcacagagtatcatactctctaacccaggaaaatatcaaaattcaaagtacagtttatactgaatgtgtgttgctttcacatcatcataaagttgaaaaactgtaagttgagccatcgtaaatcagggaccatctgcaccactatgtagggattatgctgttgtaattgaagtcccaagacaattgaccataaaacaggttatctggttgggcctgatctaaccacatgaactccttaaggggcagaaaaaacaaagatcaaagagaagttgggaagattcaaagcaaaagaagtattcagtgtaccatggctgtgtttcaagatggaggtggccatgagcaaaagaatgcaggtaacttccagaagctgagagcaacccttggttgacagctagcaaggaaacaggaacctaattcctacaatcacttcttctccccttgtcttcttccctttcttcgtgtgtaagcgcattatactatctctgtaagcacaaaaattgcctaaaatttaagtgtagttttctgatcgcttgtaaaactgacacagctataattatcatccatgtgaaaaacaccatcccagtgagaaacctgtgagcctctccccaagcagaacccattgatcctacacaggtgtcatcagagctgattcctttctatgcccctttatctctaatgtccctattctgttcctgttttcacttcaccagcagcttctccaactccctaggccaatgccctgagaatttcccttcctctcccccatcctagggatggagagtaggggttggtccccaggataagccacatttatccctggaagcagcagcagaagtgacagtatgtttgtggggtccacttgtaacctgggaaccacttgttttggcctggaaacctcgctctgtcccgaggtcagaatccacggtcactaggtggagaggaaacatctatgtcagcgtggatttgggaaacacttcagattccgagactaacacgggactggggcgcccccttgggtacgttgtcctgtccagttgctgaaagccaaaggtgacaatggggaggtctcaacctgaggaggaggccaaaagagtccggtcttctgttctcagcccggtgaccacacacaagtgccaatgttctgctctcttggattctgattgagcagcctgggagaggactgggctgcagtctaaactggacagatatggctggtgtggaggctggctgtcaatgagggagtgaaggtaagccgcccgaaaagtagataatttttacttccactttctttttctttcctgagcactagttataaaaatatccttttaaaatctaaaatattggccaggcacggtggctcacacttgtaatcccagcactttgggaggccgaggcagatggattacctgaggtggggggtttgagaccagcctgaccaatatggagaaatcctctctctactaaatatacaaaattagccgggcatggtggtgcattcctgtaatcccagctactcaggaggctgaggcaggagaatctcttgagcctgggaggtggaggttgcagtgagccaagatcgcgccattgcactccagcctgggcaacaagagcaaaactctgtctcaaaaatcaaatcaaatcaaatcaaatctacaatatttttggatttacagaaaagttgcaaagatagtacatagttctcatatgttccacattcagtttcccctattattagtgtcttattttattatacatttgtgacaggttatgaaacaatattgatacattgttactaactcctattttatttggattttattcttttccctaacatcacttttatgttccaggatcccatccaggatacattacatttagtcccctttatatctccttagcctcctctggtctatgacaatttctcagacctcgtttttgataatttggtatttcttgaggagtactagtgaggcatattgtaaaatgttccttaatttgagtgtggttgacagggctataggtttgggggaagaagagtacagagatgaaatgcaatactctcaatacaacataccaagagtgtatattacccagttgatttatcaaatgattatgttaacctccatcacttggctagggcagtgtttcccagtctataatatataatttttaatagcagcccaaagagactaaaacacttgcccttgcatgaagaaccctgtctgacttctgggagcccaaggagacgcaggggaggtccacagcgagaagaaaagggggctcaggtcgtctgtcctcaggtctatggccacttgggggtggcacctctctggtgtctcagacacaaattgagcaatcagaaaaggctgggatgtctgtggtctgagttgggcagaggtggctgaccctggaacctgacatcaatagggggatgaagacaatttctgagcagccccagtagtcagaggacaagagaactctggagccccgcactgtctctgaggttccaatcttttctcactcttcccagccccttgatagaaaaccctgggaaaactaaaaagtatactgtttttcctttaactccctattcctttcctcttctgagggttgttgttgttgttttttttaataaacttattaattttagaatacttttagatcacacaaaagttgcaaagataatacatagttctcacatatgtcacactcagctccccattgttaacatatttttttttttttttgagggaatctcactctgtcgcccaggctgaagtgcagtggcatgatttcggctcactgcaacctctgcctccgggtttcaagccattctcctgcctcagcctcctgagtagctaggattacaggtgcgcgccaccatgcccagctagtttttgtagttttagtaaagacagggttccaccacattggccaggctggtctcgaactcctgacctcaggtgatctacctgcctcggcttcccaaagtgctggcattacaggtgtgtgccactgcccccagccccattgttaacatcttatatcactattatacatttttcacaaccagtgagacaatattaatatagtatcactaaactttatttcgatttcattagctctttctgttttgaaacaaagtcttgctctgtcacccaggccggagtgcaatggcatgatgtccactcactgcaacctccacctcccgagttcaaatgattttcatgcctcagcctcctgaatagctgtgactacagacacatgccaccgtgtctggctgatttctgtatttttagtagagacaggatttcaccatgttggtcaggctggtctcttactcctgacctaaagtgatccacccgccttggcctcccaaagtgctaggattacaggtgtgagccaccatgcccagccaggtttcattagttcttttaacttcctttttctgtcacaggatttcatcgaggatatcacattgtatttagtcctaatcatgtctccttaaggctcctccaggttgactttgttttcaatgactgtcttagtatgtcgagtattactataacagaataacttgaaactgggtagtttataaagagaagatgtttatttagctcatgattttgcaggctgggaagttcaacaggatagtgctggatctggcaaacttctggtgaaggccaaatgttaggtcaaaacatggtggagaaggggaaaagtgagtggcatgtgcaaaaacatcacatggggagacagggaagcaagagagagtctaggaaaccaaacttgcttttataacaacctgctttttggtaactaacctagccccaacagagtaataaattactcgctcatgtgggagggcattaatccattcatgaaggatctgctcctgatgacccaaacgcctcccactaagccccacctccaacaccaccaccacattgagaactttttttttttgcctgaggttgggagtttgagaccagcctcaccaacatggataaaccctgtctctactaaaaatagaaaattagccaggtgtgatggcacatgcctgtaatcccagttattcaggaggctgaggcaggagaattgcttgaacccgggaggtggaagttgcagtgagccaagatcatgccattgcactccagcctgggcaacaagagtgaaactctgtctcaaagaaaaaaaaaaaaaagagtaaacaaaatttaattttcctaatggaaaaaattatggtgcattctataacaatagaggactcacagaaaactttgcaggtagatatatcaatagagcaatgaaaacaaaggtatataagtagtaaatagaaacttcagagtaaataggtaaggattccacaaaactcaatgtactgaaggttcattttactctctaaaggaggaagaatagtcgtcttgatgggtgtgtttaaggggcaatgattgtgatggagtctcaaatatttcctgacagattttctgatgtgtaacaattttcctgaaaatgcaaatgattcagatattttctttatctttcattgtttattaatatcatataaacaccagcctgaccaaaatggtgaaaccccatctctactaaaaatacaaaaattggccgggcgtggtggcacgtgcctgtaatcccagctactcaggaggctgaggcaggagaatcccgtgaaccagggaggcagaagtttgcagtgagccgagatcgcgccattacactccagcctgggcgacagagtgagactctgtccgccccgcgcccccctcccccaacaaaaaataaacagcagaacaccttaactatgaagagaatacaatatcattcatttgctctctttttttctagtatcatttatcacacacacacaccctcacaccttttgctcaataggtaaacatctctttcacttctgtatcactttctttctttctttttttttttttttttttttttttgagacggagtctcgccctttaagtgcagtggcgctgtctctgctcactgcaagctccgcctcccgggttcacgccattctcctgcctcagcctcccgcgtagctgggactacaggcgcccgccaccgtgccaggctaattctttgtatttttagtagagactgagtttcacctgttagccaggatggtctcgatctcttgacctcgtgatccgccctcctcggcttcccaaagtgctaggattacaggcgtgagccaccgcgcccggcctctgtaccattttctccactttgaggcagagtctctctctgtcgcccaggctggagtgcagtggcgggatctcggctcactgcaagctccacctcccgggttcacgccattcgtctgcctcagcctccagagtagctgggactacaggtgcccgccaccacgcccggctaatttttttgtatttttagtagagacgaggtttcacctcgttagccaggatggtctcgatctcctgacctagtgatccgcccgcctcggcctcccaaagtgctgggatgataggcgtgagccaccgcgcccagcctttttaagacagagtttcgctcttgttgcccaggctggagtgcaatggcccgatcttggcccaccacaacctctgcctcctgggttcaagtcaagcgattctcctgcctcagccttcctagtagctgggattacaggcatgcaccaccacgcctgcctaatttgtattttcagtagagagggggtttctccatgttggtcaggctggtctcaaactcccaacctcaggtgatccgccggccttggcctcccaatttcctgggattacaggcgtgagccaccgcacccagcctggtttaatactttttatttagtggcacgatgcccaggaatgaattaaagtcattaaatgaggactaggttgctatgcacttggctgtttctggacttcctgtgctgttccattggttggtctattcattcaccagtgccacactgttctagtgacagggaatttgtaaaatatttaactattaggcataactagacacccaattctcaatttgtttttttcccccaagggattttctaattattcttatttattttctcatgtgaactttataatctacttgtctagcttgagaaaaaaagtagttgttggcattttgattaggaggtattacatttgaaaatttactctgcaaatgtgctgtatagtcttcctatttgagaatgttcttctgtactacacagccataaaaaggaatgaattaacagcattttcagtgacctggatgagattggagactgttattctaagtgaaataactcaggaatgggaaaccaaacatcgtatgttctcactgatatgtagaagctgagttatgaagacacaaaggcatatgaatgatgcaatggactttggggacttgggaggaagagtaggagggggcaagggacagaagactacaaggtgcagtgtatactgctcgggtgataagtgcatcgaaatctcacaaatcaccactaaagaacttactcgtgtaaccgaataccacctgtaccccaagaacttatgaaaaagaaaaaaaaaagttcttcatttttttttttttgaaatggactctcattctgtcacccaggctggagtgcagtggtgtgacctcggctcaccacaacctccacctcccaggttcaagccattctcctgcctcagcctcccaggtagttgggattataggctcacaccaccacacccggctaatttttgtatttttagtagaagcagggtttcaccacttggccaggctggtctcaaactcctgatctcaggtgatcctccaacctcagcctgccaaagtgctgagattacaggcgtgagacaccgcacccggcccgatttgttcatatctaatttttaaatttcagatgtgttttaatgttttcatttaaagtttgcacacttcttagtaattttttcattaaaaacctttttgtttctattatatatgaggttatcgcctcacaaaaattttaactttttattgtttatatgaacaaaggcaattgtttaatgtttgggaatttatatgctactatatgctatttcttttcttttcttttcctttacttttttgttttttttgagagggaatttcactcttgtcgcccaggctggagtgcaatggcgcgatctgggctcactgcaacctctgcctcctgggttcaagcgattctcctgcctcagcctcccaagtagctgggatttataggcacgcaccaccatacccggctaattttgtatttttaatagaggcaggttttcaccacgttggccaggctggtcttgaattcctgatctcaggtgatctgcctgtctcagcctcccaaagcgctgggattagtcgtgagccacctcgcccggcctagtcccttctttcaaatttcatcaccactctttgcttgtttttctttttttcttttcttttctttttttttttttgagacagaatctcgctctgtcagccaggctggagtgcagtggcacgatctcggctcactgcaagctccgcctcccaggttgaagcgattctcctgcctcagcctcctgagcagctgggactacaggtgcgtgccaccatgcccagctaatttttgtatttttaatagaggtggagtttctccatactggccaggctggtctctaactcctgatctcgtgatccgcccacctcagcctcccaaagagctaggattacaggtgtgagtcaccgcgcccggccgcaatttttttttttttttttttttttttttttttttttttttttttgagaaggagtctggctcttgttgcccaggctagagtgcaatggcgccatattgtagcaggacgagccgcagacaaaactcctcagacaccgagttaaagaaggaatgggtttattcggccgggggcatcggcaagactcctgtgtcaggagccgagctcccccagtgagcaatttctgtcccttttaagggatcacaactctaagggggtgcgcttgagagggccgtgatcgattgagcaagcaggggttatgtgactaggggctgcatgtcccagtaattagatcggaacaaacaggatagggattttcacagtgcttttttttttttttttttttttttgagacggagtctcgctccgttgtccaggctggcgtgcagtggcgcgatctcggctcactgcaagctccacctcccgggttctcgccattctccttcctgcctcagcttcgggagtagctgggactacaggcgcctgcaaccacgcccggctaattttttgtatttttagtagagacggggtttcactgtgttacccaggacagtatcgatctcctgacctcgtgatccacccaccttagcctcccaaagtactgggattacaggcgtgacccaccgtgcccggcctgaaaaatccactgttagactgatggaatttcctatataggtttttaggacactttttctcttctcttgctcattttaagattttttttcctttacattgagtttagattgtctgatgactatttgtcttggtgaagtccatcttgcaatgtattttccaggagttctctaagtatcttctatctggattttaaatctgtagccagggttagggaagttttcctcaattatttcctcaagtagattttccacactttttacccttcattctcccttaggaatacctatgattcatgggtacagatgttttacataaccccatacttcctgaaggctttgttcatattttaattctcttttctttctttttgtctgactgggttaatttgaaagacctgtcttcaagctctgaaattctttcttctgcttggtctagtctattgttaaagctttcagctgcatttggaactactttgatgaattttttatttccaggtggtttaattttttttttttttttcttttgagaaggagtctcgctctgtcgcccaggctggagtgcagtggcgcaatctcggctcactgcaagctctgcctcccgggttcagaccattctcctgcctcagcctcctgagtagctgggactacaggcgcctgcaaccaggcccggctaattttttgtattttgagtagagacgaggtttcactgtgttagccaggatggtctagatctcctgacctcgtgatctgcccgcctcagcctcccaaaatgctgggattacaggcatgagccaccgcgcccagcccaggtggtttacttttttaaaaatatttatctcttggtaaattttttattcatatgctgaattgattttttacatttctttgtgttgttttcaactttctcttggatttcattgagcttctttataatcattattttgaattatttatttggtatttcaaagattttatttttgttaggatctattgctagaaagttagtgtaatgttttggggatgtcataacactcttttttcagagtatgttttcaaaacattctactgttttcaacagagaaacaaaggacttacttaaaaaatagaaaacatagagagttccagaatcatttctttggttccttctcatctgtagaaactttctcttcttatttttgaatttatttcatttgggcaggatttttttttccctttactatgtgactataatgtatgttgtttaaggtcctttgcatttggttgtgaatgctttcagtggcaaagacgctgtagttgtcccctggttatagatagcctttgtatggtggctttctcaaatgccagttgtggtggtgatgtactgggagtgtgaacaggctcacagcctcctgcagggccaggatggcagaggtttaagaagtttatctcatttcctcttttggaagagatgagaagtttatttccactcatgtgcccttttgtcaactgatttgtattgaggtgcgtggttcagcctccagaacagtaggtgggcttatgcctaaaagcctatgtggcagaagcacgtgagtatatgcttcatcattgtatacctagaaaagttctctgttgcctcaggaaatgtgctggtaagtggaatgtacagcagcctgggctccctgctcagcaccagagagggggacatagctgagtagagctggatccccaagcctgccccacaatggtgagcacaggcagcagctttcaggcaggagtgatggcatgggaaacttctggtgaaacgtgcctaggtctccacagatgaggagagggctgccccagcttcatgacctggccaggcaggaatgccatccatttccctgtcattccctagtcctggcatcggggaaactcaaattgaccagacactactctctatctccaactgcaatgtagttgagactcattaaagatgtcttctcctcagctcaccatttaaatgtctttggtgcagagcatcctccctcaaccccaaacacatagcttttctttttctttttttttttgagatggagttttgctcttgttgcccaggctggagtgcaatggcgtgatctcagctcaccgcaacctccacctcccaggttcaagcaattctcctgcctcagcctctcgagtacctgggattacaggcatgcgccaccacgcctggctaattgtttttgtagttttagtagagacagggtttctccatgttggtcaggctggtctcgaactcctgacctcagatgatccgcccacctcggcctcccaaagtgctgggattacaggcgtgagccaccgcgcctggcctgcacatagcttttcagctttcctgctctccactgcaggaatgctagcactccctgtagagaggggaaagggccctgtctttcacacaagcctggcccaaatggccacactgccagtggaaacacagtcacccctgatagccctagaaaggctcttctctggcacacgtgccaatttcccatgggagtggccatgctgtgtttgaagcagtggtggatgggggaagggcaggagaatttcccctttccatgcctgattctaagcactggggctgcttggctgctgggatggaactacactccttcagcgcagagctgaacacagtgtccacgactctgctggaagtggtgcagtcactcagcccacaaacaaggagctcttggacacagatgagtacatggtctggcctcctttgtcccaactggtactttttttgtgtactgcagtctccctttccttaggagcagcaatccctgatggctagaccactgggaaccctgcagctccactgggtccagccagccctgtgtggctgccacaatccaagtgggcactgggggcatggctgcaggagcttctgtgatgtgaatatacaaaggttggggttccctgggaaggacacagtcccctgatggctacactcctaatatggcaccctgccaacactgcccgagtctggaggagggacaagtgacccagcgcaagttggttgtctggtgtgatgccctccagaagttcccaaatcgccatgcacatcagtgtttggctttgtgagggcagaggagctctccgacagttcagatactggtggtcttccttagggacgacgggagtcaaaacactcctatcttacctttcaatgaaataccaagtctctcaaggttcctagctgatttctgccagcttcttactttcttctttttttctgtctcagcttttccccatgagttctgaaacattctgatgtgattctgacagctatttccacactcaggctgggccctggaggagtgccctctgctggttctctgagacctgtggctgggatcatctctgataaggtttgggtgtttgtcccctccaaatctcatgttgaaagatccccagtgttggagctggggcctagtgggaggcgtttgggtcatgggaccggttctctcttgagtggcttagtaccctgcccatggtaatgagtgagctttcactctattcgttcacacgagagctgattatttaaaagagcctagcagctctcttgctctttctctctccatgtgacacacctgctcttcctttgccttctgccacaagtaaaagcttcctgagacttcaccagaatcctagtggagctggccccatgattgtacagcctgcagaactgtgagccaaataaatctcttttctttataaattacttaaacccaggtattcctttacaacaacgcaaatggactaatacagtctccctctgctgcctccaaggtcactccttgatcttcactgctttaggcagccttttaccctactttgtagttggagcttcaggggcttaacatcttaaaagttttattttattttttaatttatgctttttaaaaaaatttttttgagatggagttttgctcttgttgcccaggctggagtgcaatggtgtgatctcggctcaccgcaacctctgcctcctgggttcaagcgattctcctgcctcagcctcccaagtaggtgggattacaggcgcgcaacaccatgctcggctaatttttgttgttttagtagaaacagtgtttcaccatgttggtcaggctggtctcgaactcccgacctcatgatccgcccgccttggcctcccaaaatgctgggattacaggcatgaaccaccgcacccagccaaatgatttttaaaaaataattactatgtataaaataacaaataggtaatttgggtaatttcattttgaactctttggctaaatattttatgtacatattgtctcagcaatcaggaattaaaatttataaacactattaacaagcaatactctctgatttgaaggagaatctaatttggaagtcagtcacatgatgattgtgtttttaagtttttttttccatgcatttgttattttatgaattggtctgaatgatgaggccaggcaagtgtatacatcttttcactggtagaaaaatctgtagcaaagcctgtgccctttttacaacaatgacttttttttttttttttttttgagatgaagtctcactcttgtggcccaggctggagtgcaatggtgctatctgggctcactgcaacctccatctcctgcctcaacctcccgagtagctgggattacaggcgtccatcaacagtcccggctaatttttgtatttttggtagaggcggggtttcaccatgttggccaggctggtcttgaacccctgacctcaggtgatccacccgcctcggcctcccaaagtgctgggattacaggcatgagcaaccacacccagcctggattttgaaaaatgtatagaatcatatatccactaccctagtaccatctacaacagttccttcatcctaaaaatttccctttgaatgttctttatcccttctccctccaacctttgataaccattaacctgttttctgtccccatagatctgctttttccagaatggtatatgaattgagtcagataaaatgaagccttttgtgtctgacatttttttcacctggtaaaacgcatttaagattaattgatgtatggattaatagcttatttacatatatatatatatatatatttttttttttttttttgagacagagttttgcccttgttgcccaggctggagtgcaatggcgcgatattagctcgctgcaacctctgcctcccaggttcaaatgattcttctgcttcagcttcctgagtagctgggattacaggcatgcgccaccactcccggctaattttgtatttttagtagagacggggtttcttcatgttggccaggcttgtctcgaactcctgacctcaggtgatccacatgcctcggcctcccagagtgctgggattacaggtgtgagccactgcgcctggccaatttgtttttttttttaaataaacatagacagcatctcggtatgttgcccagactggtcttgaaccctggccacaatcgatccttccaccttggcctcccaaaatgagccactgcaccagggcaacagctttttttttttttttagacagatccttgctctgttgcccagactagagtgcaatgatgcagtcttggctcactccaacctctgcctcccaggttcaagtgattctcctgcctcagcctcccgaggagctgggactacagttgctcgccaccacgcctagctaattttttctttttgtatttttactagagacggagttttgccatgttgcccaggctggtctcaaactcctgacctcaggtgatccacctgcctcagcctcccaaagtgctgggattacaggtgtaagccacctcatctggcctgacaatagctcatttcttatgatccatatggttataccacagtttgcttagtcttgcatggctgaaagatatcttggttgtttacagtttttagtgaacatatgtaaagctgctataaatattcatgtacaggtttttgtgtggatatcaaccttgaattaacttgggtaaatacctaagagcatgattgatggtaagtctctccttaactttataagaaacttctaaactgtctttcaaagtggctttaccgttttccattcccattagcagtgagtgggaattcttgttgctctgtatattttcagcattttttattgtaagtttaaaaaattttagctactctaatagtgtagcagtactttgttttggtgttctgttttgttttgttttttgagacagagtctcactctgttgcccaggctggagtaaagtggtgcgatcacagctcacttcagcctccacctcccaggttcaagcaatcctcccgtctcactctcccaagtggctggaatcactggcgcatgccaccacacctggttaatgtttgtttgtttgtttgtttgtttgttgagacattgtctcgccatgttacccaggctggtcttgagctcctgggctcaagtgatccttctgccttagcctaccaaagtgttggcattgaaggcatgagccactgcaccctgttggcatttccctaatgacagatgatcttaagcatattttcaagtattatttaccacccatatatcttctttggtggtgtctgttgagatctttcacccacttctaaaatcaagatttttttccccaattattgtgttttaattttgttcacatattatctttacaagtcctttgtcacatctataacttccagttttttgacaagtattttcttccagtctgtgccttgtcttcttttcattcacttaccagtgtttttgtaaagcaaaaactattaattatgataaagtctaattgatttgttttctctttcatggattgtatttttggtgttttatctaaaaactcaaactcaaggttaagattttctcctttatattcttccagaagttttatggctgtgcatattatttttaagtctatgatacattttgagttacttttttataggtgtgaagtattgtcaagtttttttttttttttttttttttttttttgtgattgagtcttaccctgtggcccaggctggagtgcaatggcgtgatctctgctcactgcaacctctgcctcccaggttcaagtgattcttctacctcagcctcccgagtagctgggattacaggcatgagccaccacaccagctaatttttgtaactttagtagaggcagggtttcaccatgttggccaagccagtctcaaactcctgacctcaagtgatccacctgccccagcctcccaaagtagatggatgccaattgtttcagcatcattattgaaaggagattcccttcttcattggatgacctttgtacttgtattcaaaatcaagtgactctatttttgtccttccatttctggcctctccattctgttctgttgatctatgtgtctgtccttttgccaataccacactctcttgatcactgtcctttgcagaaagactggaaatagtatctaataattttgaaaggtatgttttcatcatcattcagttgaaaatattatctaacttcccttatgttttcttctttgatccgtaggttatttagaaggaagatttaaaattttcaatacttttttgcccctagacaacttattattgatttccaataaaatctattttggtcagagtacatattctgtatgatttcagtcctttgaaatatgttgttacttgttttatgtctcaacatatgacctgtgttagtgaatgtaccatattcactttacaaaatatatattctggagctgttgaacacagtgactgtaaatgtcagatcaagacggttgatagtgttgttcatttgtatttttaaaaaactaagaaaaagctgggcgcggtggctcacgcctgtaatcccagcactttgggaggccaagacgtgtggatcacctcaggtcgggagttcgagaccagcctaaccaacgtggagaaaccacgtctctactaaaaatacaaaattagctgggcgtggtggtgcatgcctgtaatcccagctactcgggaggctgaggcaggataatcgcttgaacccaggaggcagaggttgcagtgagcggagattgtgccattgcactccagcctgggcaacaagaacgaaactccatctcaaaaaaaaattaataaaaaaaaaactaagaaaaaatagagcatctttaacttcccaccatatatttggcatttccagtgttggtcactcctatctgaagactcaagttaccatctggtatgacttctttcaacctgggaaactccttcagtatttttcttgcagtagagttatgtttgcaacaaattatcctagttttattttatctggagacaccttttcatttttcttccctgaaaatatttttactggatgtgcaattctgagttaggttgttttcttacagcactcaaaaaaatgccatttcattgtcttctgaccaccatagtttctgatgacaaattatgaacacatggactggtcattctcataattgttctcatgtatgtaacgtgtcatttttctctgattattctcacgattttctgtgaccataggctgctcagggctggacttggatatggccataaagtggtactgtaggaagtgcagtatcctggaattaattccggaccttggaattaacagggctgggccccttagcacctgcccttagctctcctttccccaggtccctagaaaccccctcctgatctacacacacacacacacatgcacacacaacttctaacagggcccttctcgtttttctctcccccctggttccttccactctcccccttctcttatgatccatttcatctcccttctgctctctggaccaaggccccaggcccggactccaggcttggagctcacaggctgattcctgggatgagcagcctccacctgcaggagcagcagcaggaacaagggaggggacaggagggcaaggccccattttggaggctgagggactaggtcatgtggtagcaatggtttgggggtggatgagccccagatatgatcccactgttttggcctggaggtatctcttccctaaagccaaaatccagagtcactcagtggtgggaggaaacgtcagtgtcaacatggattttgggaagctggatggactcagagcctgacttgagatcgggaacccccttgtatgcagagccctgtccaggtgctgggaacaggagagcctgggaggtcctggctagggagaaaggggagcggggtctctgtcctcggccctgtggccacacgggggcgccgctgcgctgctctcggattctgagtgctctccgggacggggctgcgggctgaatgggcagacggggctgaacctgaggtcaaccacgctgagacggaggttcctcctgagcacctctggaatccacaggactcaggttagatttgtttgtcttgcaacgtgaggcaattgtggtgtagcaagatctggctctagaattcttatggcaaaatagctgtcatagaatccaactagaatgagagtccagggcctgggttgactgccctgggcacacctgactcttgatggggttgccaaaatgtagcttggcatttacaaaaattctttccaaagattgcatcaaagtccaaaagaattatgtacaatttcatttctgatgtctctggctgtgctttcgaaagggcaggaagagccatggaaagaggctgaaaggcccctctgggaattctcaaatctcttttcatagcagtaacttggacctagacagcaaagcctgaaagacacaggtagaaggatcgcgaggcgcagccctcccttctgatcagcacaggtatggctgtctgggcgcttttgcccctctgtgttcagcaggatggactctgcagtgaggcgcagcccctgtctccccactgccccagatcagaagcatgtttccttatcttgttttccacacactccttttctttttctgtcttgtgaccacgaatagaatagacaggcaaggtcctgtaagaccaggtaaaagatgttactgatgcactttggaaggctgaggtgggcgaatcacaaggtcaggagtttgagaccagcctggccaacatggtgaaaccccatctctacaaaaaaaatcaaaataaaaatacaaaatttagccgggcgtggtggcatgtgcctataatcccagctactcaggaggctgaggcaggataatcgcttgaacccgggaggtggaggctacagtgagcagagattgtgacattgcactccagcctgggcgacagagtgagactctgtctcaaagaaaaaaaaaaaaagttagtgaaatcatgattgtgaaggaacaatggcaaatggagagaaagagcagagagacagacagagatagatacacacgtacacacacacatagagaaaatgaatatccatccatccatccatccatctatccatccatccatccatccatctacccatccacccatccacccatccacctttctatctccttgcaaggtaggttcatcaacacttttacatttatgccccagcaaaaatctttttttggctcacacctgccctccttcatccagccaactgacatatttgctgaggtcttgccacgtgccgcactgggtgctgagcattggagtctaaacaggaacagacccctgggatgcactcccgtcctgggatgcccttcactgtcccgtccctggctgtgagacatcctcatctccctgaggctcttgtttctggtcactgggaaaagtccctggcccacctctctattgacacctgggagactctatcgctactttgaataaagcactgattttcagcatttattctgtatccacacttactaatgccctttcaatttagaagttgttacaaacgggaggggttataaccttaggcacgttgtttaagagaattgtaaaaataaggaaacatgatggcaatggggttttctgctttctcccagaacacttcatattcattttctcacctgtgtttggttggttgcaaggtggcttccacacccccaagtttatttcaagtagcagaaacacttgcttagaaaacaagtactttgggaaatgcagggtctcagcctctgtcctcaggactccacacatcagaaagacatgtgcgtctcctcccacaatcctggaggtgcccgtggactgcaggttcgctcctcactgactttactcatgtcctactggaaaaggatggatttctagaaatgtcccaatggcttggaacactcaatttctctgtgtgcactgcaagcaaactgacagtttgacttttcaattctattcaatacctgaaaataaactgaattttcagtatatttccttccagagagtaaactgaaaagggaacctttctaaattcagttatgatttcctgaaacatcgaagaaggcaaatgtgggtgcccttaaagacaagagaattctctgacctcaaatttcatgtagcagctgtaaggtggagctggcagcatctgtccccacctctgggtacacagcagaacgtgccagctttagggaccccggaggacacagctgcacagtgtccgggggcatccagcaaaccctcaggaaggactcggtccacgcaggagcctccttaagcaacttctccctgaaaaaccctgaagtcttagaaatccataaagaaaaaagatattcatgtctctgataaagaaaagaaatgccagcaatccagcactgagaagggaagctacgagaccacattttctgcatgtggagaagacacgtctaatggagaggtgggaacttgtctcaaaagtgttgggccgcagtgagagggtgtggtcgtcactgccaccacccgctgctcactcagtgacccctccccattgtaactaacgggccagtgaagagaaacacttttcgtctgcttgtactgaaataaggctattacaataaatcatctctgtggttgatttttcacttaaggatgggataactggggaaattggtgcctgtagtgcaggttttaaagaagctcccagaagcccttctgaggccatctccaggaggctgccccagcgggtatgaggccttgcgcttctgccatcctgtgtgtccctgtgatggaattttggcccagctagggatggcaagaggccaggtcatcgcaggtggtctgcaggcctggtgaggaaggacaatgacagacggggaggcagaaaggcacacatatgaccagacctccccctgggtcctgctcccattcctctgtccatcgctcttgctctgtctgccctaggggaaatttcctgaaggaaacaggaaaaggaacctctattcctcgctgcatatcttttatgtaggcctttcctgttattcaagcatatccccagcagatggcagagaagacatttcaatttcgtgcctctgcttttcctccccctcctccaaccggaaagtcaggaccaagggaatggatgaaggcattaaaggtataaatgagaatgggtgataatttccctttctctgagctggggagtcccattgcaagggtgggaatagaaatgtccagtgtaaccattcagagatgacagatactgccctgaaaacagtcacaaaatcaaaccatgatgtgcctccctgggctccttggctctgggctgctgctttcttttattgagaatctaagaggtgctgagcattcagttaaaacgggactcaagggttcctgcattgtcctctgccttaattgcatttgaaaatatattttgtcagttcaatccttctcctgcccgtctctgtttctctttttaaagaagctgaacattggcaccttcaaaagaaaattgctaacatgtgaaataatatattgtctaggatttagttgaaaataacctggtgttgggctatggttgaggatgtagataaatcaagagtgggtgttactgagtgaagggtacagtgaaggtcactttactcttctgtctacttctgtgtttgcttaaaatatttgtacaagtttaaaaaaataagaaccagggttaccagggggcatggcatatgctgaataatcatgagataccggttataatttcaaacaaatctccaataaaaatagataataatttgaagtcaaaccacagggacaaaatgtttttagatgtctccaaattcctcacttccctcctctaaattcaggtgggtcacttcatactttctcccaaccgcaggttcccaataggcaggtcctagagcccaaccttggtggggcagggagtagggatttaaaaactgcatgatgatcaacagcaggaaagaggattggggctgagaggggaggagaggcaggcaggagacccctggggagttgctgccccaaggaactccttcttcaccctctgagagaaagtgtcacaggaccacagacccttggtcttcatagatcccataacctcccccgaattgtatgtaaaattgtgtgggaatgcaggtgagtgcatttcagctggggctggctttgacaaggctgtggcctgcagtagatatcaaagtagtcatctaggtctcgtgtagatgatggaaaactcgatgggagggagacacggtgccttgacccagagtcaatgccaataaacttggctaggacatagtacccagtcatttaatcaaaacctaatctagatgttgctgtgaagatatttagtacatgtggttaacatttacaatcagttgactttatgaaaaggaaattaccctcaataatgtagatggacctcatccaatcagtagaaggctttaagagcagaaactacagtttcccagaaaagaagaaattctgtcttaagactaccatatcaacttctgtctgcattttcagcctgctggcgtatcctacagatttcacacttgccaccgtaataattgcatgagtcagtttcataacacgaataaaacacacacatacacacacacacacacacacacacacacacacacaccccttattggttctgtttctctgttgaatccagaataatacagattttggtacttagagtgattctagaggaagagaatccttttaaaacgtttatagccaacaataaaaaactttattaaaaatgttgaaaagcataaaacggtaattataaattagcaaacacccaacaagaaaagcacttattttcttttccttatacagtacaagaaagagtaattgggatctcattcactttcagccaccatttgccctagatgtccttcactcaaaacaagtttttagcttgtgtttttggagtggaaactcacatggctactaagaaacaactctaaaaatgtaacttagacactcaaaattccatgtgccatgttaacatgtaatgatggttcatattacagcatctcacaataggtaagcattatttccaaagtaaaattaagtcacatttgtggttgctagtgaatgcggcacaaatggaccctgaagattcaggcattgttctgctctggagtaggacatctgtggctccagcaaactgtacaaaggcttttttttttttttaatgtatcttccgtgatacttcaattatttcaccttattaatcattttcttgcaaacaaaactgaaaatatcagttcataatgtgtttccatacaccttgcccttattcaaatggttatgaacaagtggtcttccattttctattgccgctgtaattatttgttcctgatctggcaacaccttcttcagctcctttctctggccaccgagattaacagtccaacaagcggtcttttgattcactaagtggcttaataggacaacgttgatttgagccaatacttctggcatgttcatttcaatttgtaacttttttctgaattcatccccacaaggtgagctggaaaactgcaaccataaccaaagctagaaaatactggaagtagccaatatttctcttcatcaccaaagactggtctctaatttttactattgttctattttttccagccagccaacagtagtagctgaaaagcgagagcacactgatgaagaacactgcgggcacaaagaaaaggaaaagtatgtggagctttgctgtgtatctcttagttcattctactcactagaacgtggcgttctcaggaattgacgtcctccaggcccccagatgagggtagtgagcaccctgagagccagctggactcccctcttggtgtgttactgcacagccacagcctctgggtagggagttgtcctgcacttctggaatcatctttttggtcatggtggctactgctgtactgtccttctgaggtcagtgagatagggtgttcacagcctcacttgaaaggaaacaagagacttgtcaggttgatggagagaacaagctgttcgacagtgcgcaaaccatatcctgggcttgtggttagaacatcctgcagcaaagaggtagaagagccaagggaggcatccccacatctgaggaagcccagaaacccatgaatagcgtccttgggctgacctatgctcattacaatagtagcaaacacaactctgagagggaagttaagatgctaatgagacgtaagatgtgtgtgctgatatgtacaaccacagtgcatgcacgttcaagagaccacagaacatgcttaaaacaataccccttcccacctattcatgaataatcatgtaagactcccgtgaggggagggtactgtctctcttttgagcagctgctctgatcagctgtcagagtgtactttcactttgcaataaattctcttgctgacttttactttggacttgctctcaaattcttttgtgtggcaaagtcaagaacctgaaccggcccattggctacatttccttccttttttctttctttctgtatcttgttgctagggataactttgcccctgctggcagcatgcccctgaggatggcaccctgtggctggcgtcttccttggcttggcctcgggtcactaagcatagcccatggtaggaggttctgagaatgagtggcactgccttgtgcaacggtccccatgggagtggcccacaggtgcttgcatctgtggcattttcacaactgtttaaaaagactcaagaatgtactgtgggaggagagcaggtctggagactcacctgtgtcccccacctgctcatctgcatggccgtgtgcctgacatggtcagaaatgagaaatgctgctgcccctttgcaaagcactacttagtttttctcttcttgaaggtggtggcacgatgcccaggttgagatggacgcaggagtcagcatcctaaagtaaaaggagagactttaacagaaatacctgagcttttcaatgagaatgaacagggccttttaccctctggcaactgtgtatttcccattgacatgtttcttgtcctcagaatggtttttcctttttgcaggtggtttattgaaaaaggaaaggacagaaaagaaaaagcaggagaaggtgtatgggaagctgggaccctggccctgtgcaggggagatacaaggtgcttctggggaggctgccgccatctggggcactggcacatggggcacggcagggctcgccttcctgatgatgccgcctatcccagttgcccaccagaagttgcagtgcccagattagttttgtattgatggaaattaaaaaaaaattatattacataattttatgctttttgaaaatagctaataaacttttatggctaagttgttagtaatggtaatctctctaatctgcttaaagacggtcaaatctgcagggttcccatctccactggacacctgtgcttcctgtggggtctattttccagtggctttccctgttggttgcccctgtgactgctgacatcctgccttctggtggaaaccacactcttccttgcccagtgagggttggaaaattggatgactaaactcgacgaagatagcaaataacatttgttctgcgtgggtgccatcatcacctgcacttgaaagcaaggctgaggtgcagaagacacaaaatgtggccatgtcccttggctggcaagtggcctaggggcaatgtgagcctgagtgtatgacactgtgacacaggacagggtgcgtcacagtgttgcccattgtgactgcagggccaaaaggaaccagggctgagaggaacctggagacatgctggggtggggccaaacgagggcttggagagagcctccacccaccctcacagggcctggtggagacagaccgaggaggggcatctgcccctctccccttgcagagtggaatgatagctgatgacatcattttaaaagtcacagtactacagagatgtttggacactcatcagaggcagacctgctgtgggaaagtcaaggccttggtgcggaaacctaagattctgcaaactggaacagggttatcctatgggtgccctttagaactctctgggcatgcagaggaggctcgcccttctctagtaatggttcccacttcctacactggaagatgctgcagaaacctcacccctatgatgcagtgggaattccactcaggagctttgcagtaacagccgttatgtccccgtaggagcctgaggagcagttctgggattggaatttaagggtgtttgatcaaagggccagaatcaagctggataaattaaaaaaaaacacctttggcttgggagcactttctcagggtatgggtttatcaaggacctcagggcatggggcaaacccactgctggggtggacccatgtagactggaaaaaatgatgtccaactctcagtaagttagacatgacttagttgtcctggaacatgtagaggatggacaatgaggctgagggaagtgggtgtgtgggatggagacatcatgtgaaccagaatgcccactagggccatgctccacagaggacccatagggcacaacttccaccagagcctcaggaatgtgccggtgagagggacttgcatggctaagaagcgtcggggtggtgtcctctgcaggctgggtgtgatggcaggaaggaggtcctatagttgggctcattgatattcctgaggaaagtgtggccttgaaaaggcagagaactaaatggtgacagtggcctgcaaaagccagagggcacggttaacttgacaatctcagaggagcagctgaggcagcttgatctgcagggagttgtggggaaggttaatagacggtggtgtcagaacaggcagcagccaacaagggcactgcttgacatctgtgatgagaaagcaagaattgatgagcagggggctgagggtgtttaactcaatacaaagtcatgatcccattctcaattcctaaacgtcaaccaagtttcagattcagatcccagttacagagaaggagtccctattccaggaggaaggaccctgaaacctcatggcaagtatatgctggaacaattccctctgtctttctgcaaaggagcctacagtcatttactcaggggactgtacactaggaaagggaaacaggcagaatttgggggagtgttgacattgggtgtgagctgatattgatgcctacaggcctacagcaccattatgtccctaccacagtggggcttacagaagctgggaataaatctggacacatcacaaagggactactgggtccacagacccagccctgtttatctccccattctccaagtgtgtaattggcattgatgccctggcagctggagtaacccccacattgggtcccaagtctctggaataagggctgtcattgtctgaaagccaaagggaaacctctgcaactgacttcatcctggccaaataaaaaatgatattgagtcccagggtgagtcttatgaaaggtactgtaggtattttaggtgtagcaccaccattagagagctgaaggatgaggggtgctgttggagttgcctgttatcttcacgtaatccagcaatctgtccccaaggaagcctgatggggcctaaagaatgaatgagattacttcagacttgaaaaagtaggagtcataattgcagctgccatgctggctggatatcactggtagagcagattgataaggcctcaggcacaaagtgtgcagctgtggatttggtgagtgcattcctttccattccaatgagaaaaactatacatgaagtgattcatgtgggatccacaacacatttattgataattggcctcagggttattgtaactgacctgccctctatagtatagtcttaagagatctgaagaacctggcatcctatagaatggtaaatcagcttatttcatcaacaacatcatgttgactaggatggatgagtaggagatgggaagtatgctgaaggccttggcaaaacacgtgctctccagcagatggaagataaaccacacagagattcaggagtggccactgtggtgaagttttattcatccagtggttgaggacatccaggagtttctcctccacagtaaaagacaaagtgttgcatcttgcatcctcactacaaggaaggaagcacactgcctggtgagcctctttgaattctgacaacaccacatcccacatctattgctttgacctacactctaggagaaataggaggggacttgcttcaattaggcctgctgaggaaaggacactggcagattcaggccatgaggcagcgccatccctcagacccacctagaggtgtcagtcgtggggaaagatgcaggatggagctgaaacaagcaccagtgggggagtcacacggagggcctgggattctggagtaaggccatgtcatccacagcagagacatatgcccctgttagaagcaacttttggtatgttactggccttgataagatagaatccttgccatgggacatcaaacaaccatgtgatttcaaatgcccatatgaattggcttctgtaactcagaaagtcatagatcggacagaccccaaagcatccatcatgagatagaaatggtccatctggattgagcatgaatcctatgttgacacctccagaaaacatccaaacctgaagtggcactaaacaaccaagcagacaaattgaagttagccagccctcaccatcgggcagcccaggcctggcaggatgagttcatgaatggagcaagcacagtggcaggaatgaggctaaatatgggtccagaagcactgactaccacctaccaagacagatccagctgctgccacctctgaatgtccaactcattagcatttgaggccaatgatgtgcctcagtggggctatatttctttaggtgactaaagcaacactcgctgctaagtgattagttgagccacttccattctggaagggccagaggttcatctttacagggttaggcaccattccatgagtgggttttcctgtcctgctctcagaccctcagtcagcaccactctccagggactgttgacattcctgattcacaggcatggcattgctcttagcacactgtcttcctggtggaacccacttgacagggaagcaggtgcagcattttcatggccatgggatccactggttctatcaccatctgcaccacccagggtctgccagccactaagaatgctggacaggtcttctacaggcacaactcagtgccagcctggaggaagcactctgaggggtgggtgctgtctttcgggacatggtgcatttattaaatcagagacatctctacagtgccgtgttctcagtaggaagaacatgtgggtccagaaactaaggagtgaaagtgggtatggctccatgtctcattccttagattcacctgctgtgggattttgcacttctcatctcccaaacctgtgctctgcagggtagaaggtcctggattctaaaggaaggtactcttaaatcaggacaaatgagagcctactgaagaacacattactattgcccccagagagatttggacagtatgtgcccagagaccagcaagtgaggagtcccctcctctccaggcacaggtaatagatcctaatctccaggaggaggttgggctgctgtcacaatgagggcaggaggaatgtgtgtggaacccagtgatccacttgaggggtctcctggttccccttgtcccattgtaagtgttagtggaattgtccagcaaccaatcctgagggaatttgatttccaagggcccagaaacctcaggaaggaagatttgaaccatgctcccagataatctcccaaggccctgctcctgtgctctgacatcctcagcagcattggtgcagacaccctgcttcccatgggctgttcccaaccagtgatgggtgacaagagggacactaagggaggcctatgtctggaagacaagggccaactgtggctagaggactcctctatggccttgctcaactctccttagattgcctgtggtctaggatgtgtccaacaaacctcctctcctgtccctcacttgggggtcacgcttgcatctcagtctgctgtctctcccagggtttcctggatcttttcccatattttctggcaggtgagtcctctaataaaatactgcaactttaatctcatgtcatctgcttcttggagaacatggaccaacaaaatcatttccatttacacaccagtgacctcttacttttccagtttgtaaaatcctttttattatccaacttcttccacctgctccagttttgctggtatttgtgttgttttctttgagtaaattgatgttcactgttttaagtcactaagtcttggggtagtttgttacacagcaacagatagctaataaacctctcttatgtttcgattattccatagtggttatctacatctgatttatttccttctatttttataatattatccatacataatgtttcccgtttctctccacctattctcttcttgatttttcttttccttcccaccattttttcctacttctcatgaaatattcctaacatataaaataaccctatgtggttatgatataaggaagcattttctgaatctgtatgttaaaagtttaatgccacagtgtatgggatacaagtaaagaacaggaagttattaacagagtctgagtaaaaagtgcctggtgtaattctgcggccaagacagtgactttgaactcttacaggctgatgcaaaaataattgcagtttttgccattacaataattcttaccaagaactattcacattggaccaaagccaattgtaatgatccatgtgatggagagagccagaatgctatgaaagtggccttgaccagaaataggtcatttgatccttggctcattgacatctccatagattttcggtgtacaatgttcggtctgatgtgcaaggtaattccatcttgcaaaggattcgatgttacattctaccacacacacacctgaattaaacttttacagaattggaaatgcacattactgatcaaaataaattaaacaggaaaaaattatataggaataaccagtgatagaatagcaaataggaatggaaaacacaataggattgcttaaaaaatactgtagaagtacagaatagcagtgctatttagaatcatagtgatgtccaaatcatgtctaccacgtctcattaaaaaccagagcgaaagatgtcaagtttattatggaatgcccacccagtagccagtttttggaaaatcttgttcctaagttggagctaagcattttgggctactgtatccaaccaaagttactgacatcatgctaagctagatgtgttggctgaggtatgagattcacattttttctaccttaaaagcaatctgatttggcaaatatttttaaagatgatatttgaatgagaaaattggcatttgggacattcttaaactaaatttgagacatcttaggcaaaacaaatacttatttttaaggcactattgttatggcactgaagtcttggaactatttgatctagttactgtaagttctcagctgtgttgcaactcattaaagagaacattgttattaaaggtatttgcaagaaaaacttagagatactatagtatctcctttctctgtctcaaacttttttcccctcaatacccaaggctctgtgatgtctcaaattttaatcattactttaaaaagagaagtttaaagcattaaagaattataatcagatgaaagcagctttggatttataaaattctgaaacaataattttaattttgcttaattttgcttttaacatatatgcaaattctttgatactctccactttgcagaggtgcaggttcattccctccctgtgagtgtggcctggacttaatgattcacttctatctgatggagtgactgttggtgtagaacaaaaaacttaccgtagcttctacctttgctctctctgtctctgggatcatgaactctgggggaagccagctgctgtgtcataagcagacctgtggaaaggtccatgtggctaggaccgaggcctcccgggaccagacaacaaggaactgaggccttttccaatagccatgtgagtgagccatttttcatgcaaatccccagcccagttgagccctcagatgatgcagccctggctgacaactggactgcaaccttgtgagaggccctgagccagaaacactcagggaaacctctcctggattcctgagcattggaaactgtgggagatgataaatatttgttgctttgagctgttacattttcagtaatttgtaatgtaacagtaaaaaaaaatacagcttcacaagagaggatgaatagttgcactttaattttcatttgctctaaatttattagtgttattgttatcatcattattattgagacagggtcttgctctgtcactcaggctgcagtgctgtggcaggaggacagctcactgcagcctcgacctcctaggctcatgtgatcttcccacctcagctgtctgagtagctgggagtacagacatgcaccaccatgcctggctaaaatttttgtatttttggtagagacaagggttttgccatgctgcctaggctgatctcgaactcatgaaatcaagctctctgcctgactccatctccaaaagtgctgggattacaggcatgagccaccaccacacccaacctaaattaattataaaatattaaacatgtcatttggttttaagaggtaagaggaatttccatggctaaataggatgtattttattatcattcacaattattgctttatttgaacttcaatttccacctgtgtcccaattaaactcaaaagaaagacccaagcctccctctcccgtctccctctccctctcccgtctccctctccctctcccgtctccctctccctctcccgtctccctctccctctcccgtctccctctccctctcccgtctccctctccctctcccgtctccctctccctctcccctctccctctcccgtctccctctccctctcccgtctccctctccctctcccgtctccctctccctctcccgtctccctctccctctcatgccgagccaaagctggacggtactgctgccatctcggctcactgcaacctccctgcctgattctcctgcctcagcctgccgagtgcctgcgattgcaggcgcgcgccgccacgcctgactggttttcgtttttttttggtggagatggggtttcgctgtgttggccgggctggtctccagctcctaaccgcgagtgatccgccagcctcggcctcccgaggtgccgggattgcagatggagtctcgttcactcagtgctcaatggtgcccaggctggagtgcagtggcgtgatctcggctcgctacaaccacctcccagccgcctgccttggcctcccaaggagccgagattgcagcctctgcccggccgccaccccgtctgggaagtgaggagcgtctctgcttggccacccatcgtctgggatatgaggagcccctctgcctggctgcccagtgtggaaagtggggagcgtctctgcccggccgccatcccatctaggaagcgagaagcgcctcttccccgccgccatcccatctaggaagtgaggagcgtctctgcccggccgcccatcgtctgagatgtggggagcacctctgccccaccgccctgtctgggatgtgaggagcgcctctgctgggccgcggccctgtctgggaggtgaggagtgtctctgcccggccgctccgtctgagaagtgaggaaaccctctgcctggcaaccgccccgtctgagaagtgaggagcccctccgtctggcaaccaccccgtctgggaagtgaggagcgtctccgcccggcagccaccccgtccgggagggaggtggggggggtcagccccccgcccggccagccgccccgtccgggaggtgaggggctcctctgcccggccgcccctactgggaagtgaggagcccctctgcccggccagccgccccgtccgggagggaggcggggggggggggggtcggccagccgccccggccgggaggtgaggggctcctctgcccggccgcccctactgggaagtgaggagcccctctgcccggccagtcgccccgtccaggagggaggtgggggggtcaaccccccgcccggccagccgcccagtccgggagggaggtggggggtcagccccccgcccggccagccgccccgtccgggaggggggagggggggtcagccccctgcccggccagccgccccgtccgggagggaggtggggggggtcagccccccgcccggccagccgccccgtccgggagggaggtggggggatcagccccctgcctggccagccgccccgtccgggaggtgaggggcgcctctgcccggccgcccctactgggaagtgaggacccctctgcccggccagccgccccgtccgggagggaggtgggggggtcagccccccgcccggccagccgccccgtccgggagggaggtggggggatcagccccctgcctggccagccgccccgtccgggaggtgaggggcgcctctgcccggccgcccctactgggaagtgaggacccctctgcccggccagccgccccgtccgggagggaggtggggggaacagtcccccgcccggccagccgccctatccaggaggtgaggggcgcctctgcccggccgcccctactgggaagtgaggagcccctctgcctggccagccgccccgtccgggagggcggtgggggggtcagcccccctcccggccagccgccccatctgggaggtgaggggcacttctgccgggccgcccctactgggaagtgaggagcccctctgcccggccacgaccccgtctgggaggtgtgcccagcggctcattggggatgggccatgatgacaatggcggttttgtggaatagaagggcgggaagggtggggaaaaaattgagaaatcggatggttgcggggtctgtgtggatagaagtagacatgggagacttttcattttgttctgtactaagaaaaattcttctgccttgggatcctgttgatctgtgaccttatccccaaccctgtgctctctgaaacatgtgctgtgtccactcagggttagatggattgagggcggtgcaagatgtgctttgttaaacagatgcttgaaggcagcatgctcgttaagagtcatcaccactccctaatcttaagtacccagggacacaaacactgcggaaggccgcagggtcctctgcctaggaaaaccagagacctttgttcacttgtttatctgctgaccttccctccactattgtcctatgaccctgccaaatccccctctgcgagaaacacccaagaatgatcaataaaaataaaaaataaaaaataaaaaataaaaaaaaaaaaaaaaaaaaaaaaaaaaaaagaaagacccaagccttgctaggctgattctatcatcccccccatgatagacgtgtaaccttggtcattcacctgaccccagttattcaaccaacaataatgtaagtcctgccttgaagggatttttgcatatataattaaggtcctaaatcaattgactttaagacagggattatccctggtcgggctgtcctcatctggcgagcccctgaaaggactgggttcttcctgatcagagagattcacagtgtgagagggattcagtgtgagggggttcctccaatgtggattctaaaaatgaaggggctgtgtggcaaagaatgctggtgggcaccaggaattgagagcagcctctctctaccttgacagtaggcaaggaacaggaaccttagtcctacaactggcagaaactgaattatgtcgcctctgtataagcctgaaggaggccctcaaaatgaaaacacagttttgggaaaccctaaacagagaaccctccaatcatgctcagatttctgactaaggaactgtaaataaataaataagtgttgtttggtcaaccatggtagctcatgcctgtaatcctaaggtttgtgggaatgacacaggaggattacttgcagccaggagtgagactagcctgggcaatttgaggagaccttcctctctacaaaaaggaattttttttttttttaatttacctgagcacggtggtacttgcctgtagtcccaggtactccagacactgaggcagggggacctctagaggccaggagtttgaggttgcagggaaccatgatcatgccactgcacttcaccgtggataacagagggagaccatgtctctaaaaataaataaataaatacaataaatgggtgttgtttaaagccagtgtttgtggtaatttgttatgcagtcatacaaaagtcatacacagactcaacagacacatggaatgaatttataaattgataagcacactacatgagtaaaataaaatatttcctttttccagtatttttcattttataatattccatgatgcgattaaatttttatacaatcatatttcattcaactagacaacaaaaattaatttagtgcctatgctgaaccaggtatgccctcatatgctcaagtgcctgacattctagaagcttcacaagaccgaagtggagccactggagtgttttaggtgaagaaacgacacactttgactcacagtagcaggaccactgtggagagaacactcaggtggcaggtaatggaacagtgctagagccactattcaggagtgacagagtggtggggactaagggaagaggagggcctgagggatgagagggacggagggaagggctggagaagcaggaggtgaggagaaggagcagagggacagaatttgaaagcagcagaattcttagctttaaacacattgttttataaatttttaatacatccatctacagagcctagcagggtgttccttgcatttggcctttaacaccttatgtgggactgcctaaaaattaattgctttttctgctttttttcaggtttaaaaaaatactaagtgttccaataaaacatgcacaccacttagatgcggatacttcctaaaaacaggaagtgcatgagcactggtgaggggcattgtgactgcgttgaacacttgcaactttgaggtgaatgaatgtattggctcctggttgcaatatacaatcacacgttgtgctactttgtattgtcaggagatgtcctggactcccacagaaactcagggctatggaatgaaggtaattttagaatacaacaagagtcacagatacatagtctgggaaagcaaaacttaggagctctgagagttgtacaactgtaatgcatttagacacatttatatatcaaggggccaaagtaacagtttttacacataagattcctgattggtcgggcgcggtggctcatgcctgtaatcgcagcactttgggaggccgaggcgggaggatcacgaggtcaggagatcgagaccatcctggctaacacggtgaaacccgtctctacaaaaaaattagccgggcgtggtggcgggcatctgtagtctcagctactcgggaggctgaagcagaagaatggcgtgaacccgggacgcagagcttgcagtgagccgagatcgcgccactgcactccagcctgggcggcagagagagactccgtctcaaaaaaaaaaaaaaaaaaaaaaaaaaaaaaaaaaaaaaaaaaaaggttcctgataattcaggggttaccaagattctactactcactgcagctaataaaaaaaaaaaagaaagaaagaaactggtctctgtcctatttcatatgctcaggtacaacttttccagagaagaagaggaggggggcggggaggagcaggaggaggaggaaagaaggaggagaaggagaaggagaaggagaaggagaggaagaggaagaggaagaggaagaggaagaagaagaagaagaagaagaagaagaagaagaagaagaagaagaagaagaagaagaagaagaagaagaagaagaagaagaagaagaagaagaaaaggaagaagaagaaactgtctctacaccttcattctcaggacaagttcattgtctggcaccaagctccttggggtgaattttcttccaaaagagtccggggagtccaggtatggaatgggaggcagaaagttcaatcaagggactgggatttcggaatgaataatgaagggagatggactgggtccatgccgaaggtttctccctggtttctcagcccccgggcgaagactcagggagacattgagacacaccctgcacaggagggggagggggagggggagggcaaagtcccagggccccaggagtggctctcaagggctcaggccccgaggcggtgtctggggttgggaggctcagtattgagaattccccatctccccagagtttctctttctctcccaacccgtgtcaggtccttcttcctggatactcataacgcggccccatttctcactcccattgggcgtcgcgtttctagagaagccaatcagtgtcgccgcagttcccaggttctaaagtcccacgcaccccgcgggactcatatttttcccagacgcggaggttggggtcatggcgccccgaagcctcctcctgctgctctcaggggccctggccctgaccgatacttgggcgggtgagtgcggggtccagagagaaacggcctctgtggggaggagtgaggggcccgcccggtgggggcgcaggactcagggagccgcctccggaggagggtctggcgggtctcagcccctcctcgcccccaggctcccactccttgaggtatttcagcaccgctgtgtcgcggcccggccgcggggagccccgctacatcgccgtggagtacgtagacgacacgcaattcctgcggttcgacagcgacgccgcgattccgaggatggagccgcgggagccgtgggtggagcaagaggggccgcagtattgggagtggaccacagggtacgccaaggccaacgcacagactgaccgagtggccctgaggaacctgctccgccgctacaaccagagcgaggctggtgagtgaacccggccgggggcgcaggtcacgaccaccccccatccgccacggaccgcccgggtccctcagagtctccggatccgaaatctaccccgaggcagcgggacccgcccagaccctccacccgggagagtcccaggcgcctttacccaggttcattttcagtttaggccaaaatccccgcgggttgggcggggagggggcggggctagctgggcggggctgactgcggggaccggctagggtctcacaccctccagggaatgaatggctgcgacatggggcccgacggacgcctcctccgcgggtatcaccagcacgcgtacgacggcaaggattacatctccctgaacgaggacctgcgctcctggaccgcggcggacaccgtggctcagatcacccagcgcttctatgaggcagaggaatatgcagaggagttcaggacctacctggagggcgagtgcctggagttgctccgcagatacttggagaatgggaaggagacgctacagcgcgcaggtaccaggggccatgggcgccttccctatctcctgtagatctcttgggatggcctcgcacaaggttgggaggaaagtggacccaatgctaggatatcgccctccctctagtcctgagtaggaagaatcttcctggctttcgagatccggtaccagagagtgactgtgagagtccgccctgctctctgggacaattaagggatgaaatttctgagggaatggagggaagacagtccctggaataccgatccgcggtcccctttgagccctccaacagccttgggccccgtgacttttctctcaagttttgttctctgcctcacactcaatgtgtttgaggctctgattccagtccctcggcctccacttaggtcagggccagaagtccctgctcccccctcagagactctaactttccaaggaataggagattttcccaggtgtctgtgtccaggctggtgtctgggttctgtgctcccttccccaccccaggtgtcctgtccattctcaggttggtcacatgggtgctgctggggtttcccatgaggagtgcaaagtgcctgaattttctgactcttctcagatcctccaaaggcacacgttgcccaccaccccatctctgaccatgaggccaccctgaggtgctgggccctgggcttctaccctgcggagatcacgctgacctggcagcgggatggggaggaacagacccaggacacagagcttgtggagaccaggcctgcaggggatggaaccttccagaagtgggccgctgtggtggtgcctcctggagaggaacagagatacacatgccatgtgcagcacgaggggctgccccagcccctcatcctgagatggggtaaggagggagatgggtaaagaggggaacgaggggtcatgtcttttctcagggaaagcaggagcccttctggagctcttcagcagggtcagggctgaggcctggagatcagggcccctcaccttcccttcctttcccagagcagtctccccagcccaccatccccatcgtgggcatcgttgctggccttgttgtccttggagctgtggtcactggagctgtggtcgctgctgtgatgtggaggaagaagagctcaggtaggaaggggtgaggagtggagtctgagttttcttgtcccactgggggttgcaagccccaagtagaagtgtgccctgcctcattactgggaagcaccatccacactcatgggtctacccagcctgggccctgtgtgccagcacctactcatttgtaaagctcctgtgaaaatgaaggacagattcttcacttcgatgattatggtggtgatgggacctgatcccagcagtcacaaatcacaggggaaggtccctgctgatgacagacctcaggagggcagttggtccaggacccacatctgctttcttcatatttcttgatcctgccctggatctacagttacacttttctggaaacttctctgggatcaaagactaggggtttgctctaggaccttatggccctgcctcctttctggcctctcacaggacattttcttcccatagatagaaacagagggagctactctcaggctgcaggtaagatgaaggaggctgatccctgagattgttgggatattgtggtcaggagcctatgagggagctcacccaccccacagttcctctagccacatctgtgggctctgaccaggtcctgtttttgttctaccccaatcactgacagtgcccagggctctggggtgtctctcacagctaataaaggtgacactccagggcaggggccctgatgtgagtggggtgttgggggggaacagaggggactcagctgtgctattgggtttctttgacttggatgtcttgagcatgaaatgggctatttagagtgttacctctcactgtgactgatacgaatttgttcatgaatattttctctatagtgtgagacagcttccttgtgtgggactgagaagcaagatatcaatgtagcagaattgcacttgtgcctcacgaacatacataaattttaaaaataaagaataaaaatatatctttttatagatacaggtagatatgtttttatagcatgcacgtaaatgtgtgtgtgtgtgtgtgtgtgtgaagagaaagagtgaatagagagattaagattcttttaatggtgaaaagatatacatatatttggaactagccagcttgactcagtttaggtgatcccaattttggtggcaacaaccaaagcatcgtagtcaggagccagtcgaacatatgccttcctctctccatcagactgaatcagagtgttgactttggccacatcaatgtcacaaacttcttcacagcctgtttgatctggtgcttgttggctttaacatccacagtgaacacaagtaggctgttgttttctatcttcttcacagcctactcagtggtcagcggaaacttgatgataacatggtggtcaagcttatttctcctgggggtgctcttccaaggatatttgggctgcctccggagtcacagtgtcttgggccgccggaaggtgggtgacatgtggatcttgttttttttgtggctgtggacatctttcaacactgccttcttggccttgcaaagccttcgctttggcttcggctttaggaggggcaggagcttccttcttcgttcttggcaccatcttatgaaaagggtccagattaagatttttgactgagtcattctaaagtaagttgcaagacccatgatactagaccactaaatacttcatcacacacctcctaagaataagaaccaacattatcacaccaaagaaaataaataattccataatattatttaaagtccttttatgttcaaatatctccacttctttcagtacatttttgtacctattttttatagcttgttttcttaaaatgtccactcgttgcctttggttatgtttctttaattacctacaatctataacaatcaacccatcttttttcttttagaatggcattacctgtttcagagatgaggccaaatacctgtggaatcttctccacactgaatttatcatattatttcccctgatgcctttaacttttttcctctaactgctatgcctcctaaggacctatgtagctctgggttaaacatttggcagcaatgtttacaggaggagctgtgaccgcacattcatcacatcaggaggcacacaaagcctagggttaccaggactctttctgaccccatacagccaaatttatcctgacttcccagagatgcagaaccatgggctgggtgtttagtgggtatgagtgtgatattctggcaataggaggttctgccactctccccattcctcacgagctttagttccccataccctgaggttctgagctccagaccttcaaccatcaggccaggcccctccagacctagactcccttcctgtcttctccagccccactctgctttgtatctacttccggatcactttccctctacaggcccagctcctgagtgtctctacctctcaaacaagtattctcatccaggagcaattttcccaccagaggacattagctatgtctggaaaaatgttttgttgccatgactggagtgaggaggaggtgctaccagcatcttgtggggaatgaccagggatgctgaacatcctgcagtgcacaagtcagcccaatcacccacataacagataattatccagccccaataccaagattgccaagggtaaggaggcctgccaggactttctctcccttgagtacaagcttccttgaactgagggacaccctgaaggaaaagtgtggtcccaccccagtcatctctcccttccctggagctccatctgtatgcctgtagtgcttaggcctgtaacctggggtccaggaacccaccttcccatgagactgcatgcagaagtgatgatatgtgcacacatgacttcattacagggcattggatgttgatattcatcaggtcagctggggcccaagacactactcttctgccaacaggccgcaatcctctgcattagagagagggtaaagattgagggaggccctaacttcaaaccttctatcactgctagtgaagtgccaaaaagaagtgcaaggtcatctgcccttgtaggaaccacacaggaaggcagagtgtccaccaatgtcaaattccatcaaagaaataatattttgacaaaaaatgcaagtcacctttctaagtcccagacagcagctcaaaataaaaagcattaaacccctcaaatcttagaccaggtgaaattattgaagctgcagtaaggtcttgtgggacctgcagttagagagaagggacaactcaatttgggactgcagcagaaacccctacatcatggggttcctggaagggaccctctcccttcagcgacgcattgtgaggccatttctaggtaaaaaggtagaatttccttggattcctgaggtttattttacacttactgcttattctttgactttatagaagccaacttcagtttgaacatcttgcaattaattttttttggctctaagtggagaatttgaacttgtttctgaagaaaaccaggggctccttatgtgagcaagcaaccctccctgtggcccccttatgcaataaacataagccattgtgagccagcaaaatttaaagcaaggaaagcagtaaaccctccatttcagcatgtttcagcctgtctagtgatgttctagtcttgcctcactcttaacattttaaaatttataattttatttgattttgatttaataagaattcatatgtattcatttcttttgggtttgtcaccaaaagcctcctccaatcacctgtggagtaaagacaagtaaataaatgcatggtgttcccatttatcagtgctcactgcatcttacaagtgtatcagccccacttcagctgatagtaccaggaaaccttaatacccacatacaaaataatgatgttggacaaaattcatagcatcaccttacaccatattcaaaaattaactcaattaactcagaatggttcaaggaactcaacttaggagttcaacctataaatcttttagaagaaaacattgaagaaaatcttaggaacattggatgtggcaatggcttcttggctggtgagcaaaagcacaaccaataaaagaaaaacaataaattagactatcaaaatttaaaaaccttttttatatatcaagggacactattaagagagttaaaagaaaatgcacagaatgggaggaaatatttgccaattatatacctgataaagaattaatatccagaatacataaagaactatgacttaacaacagaaaaacaaacaatctcattcaaaaatgagtgaacaacatgaatagacaattctccaaagaagatatacaaatgggcaataggcacatgaaaatatgctgaacttcactagtccaagtgttggcgaagatgtggagaagtcacaacacttgtacactgctggtgagagtgtacagtggtacagcgaccatgaaaaacagtatgatgcttcctcaagaaagtaaaaacacaatttccataggagccaacaattccacttttgggcatatacccaaaagaattgaaagcaggaactcacacagataattgtacactcatgctcgtagcagcactattcccaatggccaaaaggtggaagcaaccgagtgtccatcggaggatgattagataaacgacccatggtgcacatagcatggaatattattcagccttaaaagtgaatgaaattcaggttggatgaaccttgagaacactataagtgaaatgagccagaaacaaaaagacaaatataatatttcacttatgtgatgcagctaaaataggcaaattcatagaaacagagagtaaaatagaatttaccagaaattgagggtagggagaatgggcagctttggtttaatgggtccagtttctgttgggatgatgaaaatgttctggaaatgcatattggtggtggttacacaacattgtaaatgtgctttaggccaccgaattgtacactgaaaaagtggttagaaggtaaattacatggtatgtatgttttaccacaatattaacaagtatatcaacactaaatccaatcacttttcactcctctcctgccaccacccgagagccaccctctcaagaactgtaaaccagaagggctttccagctgggctgcctgctgcctctcatgcccactgtccattactcacacaaaggcagagtgagcctctcaaacgaaaattaggacatatcctatgaacacctcagcccttttctttcctaggcacaatgaaacctcagtctctcaccgtttcctacaagcccctcatcataggacccctgtggcctcatcccgccattctcagcccagctcactcgtctccactcacaccagccttttgtcactgctccatcctgtctctgctacctgcccctgctgtgactcccacatgcacctgctccccgggggtccacatggctcactcctcacaccattcaagtctctgttcaaatgtcccatggtcaagttctcagaaatgtcatgcccagttaccttttctgaaatctattccctgccattcccgccactcccaccaatcttctagcctaggtgtattttttatcagtggcaattatcactgatactgtgacagattctatttgtttattgtctgttggtgtatcagggttaccaagacagaaagacccaatagagtagatggatacatagatagatagatagatagatagatagatagatagatagatagatagatagatagatagacaagaggggatttattagtggaaatggctcacatagttatggaggctgataagatccatgagaggccacctgcaagctggagaaccaaggaagacagtagcctggctcagtccaaggccaaaggcctgaggggccagaggaggaggtgggaggataaagggttgactggtgcaacactcaagagtccaaagaccatacaacctggagttctgatgtccaagggcaggaaaagtgtcccagattgagagagagagagagagaaaatttgactcctttctgcttttttgttctatctgggcccctaggtgattggattgtggctgcccacagcgagagaggattttccccgctcagtcactcacatgccaatcccttccagaaacaccctcgcaggcacacccagaaataatgttataccagctatctaggcatcccttaacccagtcaatatgacacctaaaattaaccattacagtcagtatcactgaaatgtatgttctttgataaagggatctggtctgtttccttaccattgtttctcaccatcataatcagtaaatagctctcagtaagtatttgttaaatgaataaatatgtcagtacaatcacagtatgacagtataataaggctttaaaatgtttaaagcagtctctggtttaatatttatcacttgagtagtctatgaatttatttatttttggagacaaattctcactctgtagcccggtctggagggcagtggcatgatcacagctcacttcagcctcaaccttccaggctcgaacaatcttcccacctcaaacactggggtacctaggactacaggctcatgccaccatgcccagctaatttttttttgtattttttgtagagacaggattttgccatgttgcccaggctggtcttgaacttctgggctcagacaatccaccctccttggccttccaatgtgttgagattacaggcttgaggcaccgcacctggcctgagtagtctatgaatttttaaaatcccaaccacaggagaatctttatgtacaaacatgcttgtcaaaatattacctacaaaaagataagatgaaagcagatggatctaaaagaactcagttacatcacctccttatctgagatgggatgcagcttgtaaaagtgtgtcaactttttaaatttaaaaatttttttagatggagtctcattctgtcacccaggctggagtacagtggcagtgatctcggctcactgcaacatctgcctcctgggttcaagcaattctcctggctcagcatcctgagtagctgggactacaggcacatgcctagactcctggctaattttttgtattttttagtacagatggggtttcaccatgttggccagtctggtctcgaattcctgacctcaagtgatccacccacctcggcctcccaaagtgctgggattataggcgtgagccaccatgccggccaaaaaagcatgtaaactttatacagagtttacaacatggaaaactacttgtaaaataatacattcaaaaagcaacattcaagataacccatgacatatgaatgcaaccttgtacaataaagatacctataaaaatatatacatagagaacaacaaaatgggccaggcgccttggctcattcctgtaatcccagcactttgagaagctgaggcaggtggatcacttgaggtcgggagttcgagaccagactggccaatatggcaaaaccctgtctctactaaaaatacaaaaaatttgctgggcctggtggcgcatgcgtgtaatctcagctactcaggaggctgaggcatggaaatcacttgaacccgagaggcggaggttgcagtgagctgaggtcgcaccactgcactccagcctcagtgacaaagtgaaattgtgtttcagaaacaaaaacgaaaacaaaaacaaaccaccaccaacaaaatggaaatcagcaccacgcaaaggacagctccagggaccaacagtcacactgagtccaggaaggttcaacaatacaatagcagtgatatttttgaggggagacctaggtggtatttcttctgtgtattttattttttttaattcaagtaggcattgatctgtgtattttaaagtcttctgtgatcaaatagattttcacatttctaatattcaaaataaagcatttgaagtaaaataacaatgaaaagtggctgagtgcacacctgtagtcccagctactcaggaggctgagatgggagaatcacttgagcccaggattttgaggctgtcgtgtgctattatcacacctgtgaatagtcacttctctccagcttggacaacatagcaagaccccatctaaaataatagtaatacaaagaagttcagatctccttccaacctcagcctaaagcaaatttctcatttgaaatccatagggcagaaatgccgattatggcacctccagagagtagaaaaatattcttcctccactccatgactcatcctttggttacagcgtttagctgagcaatgaagtcaatgctaagaataccatcaatttataaaatactgattatctcatttatagacataaaaatactataattatatatatatttatgtaaaattaccatcacacctaagacagcgagatggatttttcccttccacagatgaaaatatgagtccctgagaacataaaatcttcatttgagctcactgaaaatgttggccttgagaattaggagacactcagtctcctgcaggccccctgggcatgagccacaccagtggaggccacacaacagcaggaagagcaactgagaaccctggaaggttcacacttgtagagggtgcacatccagtgaaatgcagttgatggatgggccaaggtaataatccagctccttccttcagctgggggaggcagatgggtgagtcagctacgcatgaggtgtatggtgttcctagagctattgttagttcctctgctgtgaactccaccccgggcatacaaaaattatatactcactggtaagcaggatcctttttaggaaagcaaatgactttcctaacataaggtcaaacatttccctccaaatgaatcatcctagttggataatctcttcactcccactgaaattgccccagagttgcacctgagcatttggatccaagacagaaagtcattttgggggttgggtctggctgatctgggagtgttgtgaagaaaggctttctacttacagaagaacaagggtgagctctgagtaggagatgacatcctgagggggaaagacagatgggcagatgctcaagcaaactcaggagtttaccatataaaagattttggaatctattcttcagcctcttttttactgtgatacaatatacatgaacacaaaatttaccactgtacccattgtacaataggtgtacaatgcagtgacaattagtaggttcgcaatgttatgtagccatcatcactctctagttccagagtatttcatcacctcaggggaaactctgcaccattaagcagtcaccctccatttcctcctgccaccagaccctgtcaccacaagtctgctttctttctctatagattggtctcttctgaagatttcacaaaaatgggttcatgaaatatgtatccttttgtagctgatttccttcacttatcatgtttttgagattcagcaatgttgtagcatgtatcagtatttcattccttttatggctaaatcatattccattgtagaaatacactacatgttgtttattcattcattagtcaatgggcattttcttttaaaccaaataggaaaaacaaaggaagaattaaacaccaaaaatatacatgttactactagcttttataggactactatatatagtactatatatatatgcacacacacacacacacacacacacatataaacaccaaaaatatacatattactactagcttttatagtatgactactatatatagtactatatatataatttcatagtagtactatatatagttatatatatgtagtactatgtatagtcatatatatgtatatatatgtatatatatgtgtgtatatatatatatttatatatatataaaatccattatttctgaaggagagtttttccagacacacaattcctgcatgacagtctttttttttctgacctctaaatttgtcaacattccaatgccttctgaactctatggtttctgaagaaaactgggctgcaatcttattgaggatccattgaacctgaaaagttccttctctgttattcatttcaatatgctctgtttgtcattggcttttgacaggttgattataatgttctcttggtgtggacctctttaaatttaattttttttgctgcttaaaatttgtcaagtttgttggatgaataatgtttttcatcaaatttggaaggtttggagttattctttaaatagtcattcttctcctttctctctctcctttctttgaggactcccaaagtgcatgtgcttgatgttgtctcacagatctttaaagttctgtttatttttcttcataattttttttctttctgctactgaactagagaatttcaattgtcttatcttcaagcttgctgattctccattctgcatggtgaaatttgctctggagcccctctagtgaatttttcatttcagttattgcacttttcagctccaaactttttatctggtctctttgtaaaatttctacctttttattgatgttctctatttggggaaacctgcaaccaccatcttctgaagctctgcccatgtcaagaggtctgtgcatacctctctcttccatcccccagttttccaactttattttgctcaagttcctgactgaccaagcaacccatgagccactgcccatgactcattcattcatgcactactggggcatcatttcacaccctccaccttgcatgggcctttttgggttttgattcctagttcctggctcaacagccatttccaaagctgttcttgcgttagctcccaagcctactgctcttgttgtagattctcctcttaatgtctgagtcacagcatttatttcatagatttttaataattggactaattttttccaatgcagcatttctaaggactttcagtaatggagattctatattagcttagagagaattgtttcaaaacatcagaaatgtatacttgaatgaaggacaacatgcatggagaaaggtggacaaaccataagtgggccgtggattttcacaaagtgaacactcaggtaaatagcagccacatcaaggaatagcatttccagcctccaggaaacaccattgggttctacttggtcataaatcaccctccccaaccctagagcagacactttcttgatttctaatatgatagattagttctgtcagttctggacacagtcactgccatgtcccaggtcttgctgtgtgtggtcactatcactcccgtggcagtcaggtgctcagctttataaatagctcacacttcttgtctctccactgttgatagacatttgtgttgtattcagagtctacaaatcgtgctgctataaataatattttcatatattttgggacacaaatgcatgcatttctattggtatataacaaaaagtggaattgctgggtcataggtgattagaaacttggtttagtctctcaaaaaacaagtttctactgaatagataactggtggaagagggtaaatcttttattttagaaattatgcagctagtatatgaaaagaaatgaaagactgagacttttgcaatttgtaatgaattaacagatttagccactgaacagcaatggcaattaacatcacaaaaaagaaataactagtattgaattcttcctcttgatgaaaaacatgatatagtaccatcaatcctcatggcaaaaaaaaaaaaaaaaaaaaaaaccctgaatagacgcaaacctctataacaaactaccaatttacagaaaatacaggtcatagagatacattaaaccacaccttggggtgcaatctgcaaaatgcaaaggacaggaaactaccagacaatataaatttcaagcaggaatctatggaataaatgaggataaaaatatactcttaaaggtaaaactaaactataactttagatgataaaaatataaaattgtacaaagaagtgatggccatgtaagccaggatgtgcttttatttgaagaagagaagagtttatcattgagctggggcagttgatggggcttctaggtcagctgccaaacttctccctctctctgatggttaaagggtgtttacttttgattaaagggcaccatttttagatcttttatcttttatggtacccgtggggttttttatgacaaaaacactaataaagaataaaatagtatgtgacatatggttcttgttctgcatcaagcctccttcccaccctccgctccagacactgagcacccagaactactggcaaccccaggatacttggcagggctaccttacatctgggtgtgtgtccagctcacattgccagaggcaatgtccagggtctattctttgaggcctagataaacctgacaggacacagctgagggaaaagcctggccccactctggaggctctggccatcggtgtagaggggacaggtcctcacctctccacaggtgcagttacagtcagagcttcttctctgcatgggagtgaggcttggtccttcccccaaacacggggacagtgatctctccagaagtggagatgacaccattcctcctctaacatggtccaatctcgtgcttgttctgctttacaggaaagttgactcatactggtgtccagtgaagaaacccaggcgcataagagggacagttggatctcaggtttgtgcttgatctggaaaaggaagagcagagaccactaggaggcaccactgcactgctcatgagcccaggaggtggatgccggggctgagctcagggtggagagatgtcattgctcatcctccaggttccaggtgaaaacccacctgcccagcccatctggttctccctggttcttcaattctagggaggactgtcttcttctcacctccccggacgatgcttcttgacacaggaaagaggatgtgctgctagggtcatcatgtcctggtttattgtgttgtcagtagaatgaaatcaaaatacatacttcataaataataaaataacccataataagtaaacatttacaatttactcacaccattgaggtttcctccaggtgtgagcacagctgcagacacaccttgtcgcttcagtcaggacacaggacagagtaaaatgggaagaaaccacagtcactgcagaaagggcccccatggaagaggcctggcagggaggccagctgccccagggccaccatatttagagatgacttcccctttctaggcaggactgggattttaaaattctttttgtattcatagttgttctgaaattgcaggatgatgagacccagcactggtgagttatactgtctctttcttccctattaaattctgtgccaaacagcaccttcatatatttatctcctcttcctggagagaataaaaacaatggaaaaattgaaccatacaaacatactttaaatatgtgctgtcagaagtagctactaaaggattaattccaccaaagtgagggaaggtttgaaaagaaaaacattgtatacccatattcaaagcagcattattcacgatagccaagacaacacacaccaacacatgaatgaagaaaatgtggtatatatcgacaacggaatatcattcagccttaagaaggaaacctggtcacaggctgcaacagggataaacctgaaggacactgctaagtaaaataagccaatcacaaagaaaacccaatactgcacatttccatttatatgaggtgtctaaactgaaagtagactaatggctgctaggggctcggtgagggggatggatgaatgtttgttcaatgggcatagagtttcagtgttgcaagatgaaaagttctagagatctgttgcacaactatgtatttacagttaatactgtactactgtatactttaaaatagttaagataccaaattttacataatgtagtttttggcccaaggaaaagactaattagccctgttactaatttagggaaaaagtacatgaattcattaaaaatatattagtatgcgcttaccttagatacagaaaactatgagacaaaaagagagatccctgctaccccagctatcacccatgaaccaggaaaatcagcacctcctgaaactagacagaaaggctcacaggcccagccttgacatgttgaatcagtctgcattttggctggaacccaggtggctccactgcatgtaaagcaccttcccagatagtgatggagggagatcctaggacagtgactctgctccacggggagaagcctccagtccagatgggagcagccagaagggcccaggagggacatttccaagaagataaaattaacagaatgtccaaagtgtccaacgtcttgaaagaatcatacaaacaaaagagatatcaaacttaaattaatgagagttaataaaataaacaaaaacaaatgcaagtattaactccaagaagaaccaatgttgtacaggcagtgaaaagtagtccagttgacatatgagaggattagtcatggtaaaagaaacaagagatggctgaactaaacataatcactatataaatatactgggaagagtgaaagagaacaagtactcttaactgttgcatccaccattgcgctgtgcaacaatgggtgcatctgaaaaaaatcaagcaataataataaagaaatggtagttagagatacagaagtaaagtcaaaagaatcagctaaaaaacttgaaagtggttggcccctagaaaggcagaaattgagaagaggcagagaggactctcatttttctcaagagattctgcacaaatatttgactctttcaattgtgcacaattataaatttgattaaaataaaaacaaaagcttcagtgaatatgcaagtttatgtctaatgacaaccgcattcaacaatgatatttaagggttaactaaaatgtgaaaatacttaaacatgaaataggcatgtataaatgtgtttttgacaccaaacgtgaacacaaatgtgaaataatacacctgtaaacacatctctggatagatagcccacgattgaattctctaccccacctcctttactggttgacctgtgaacacaggcaggcagtggaccaggacccaactaggttccttcatcctcttgcttctaggcaggccttgcatccacttttgctgcacagagggctcccatccctgccttggtccgtttcacaggtgatcccataactctccctgccaccactgccttacctgagtggagccgaggctaccctgaccaagaagagcaccacccatctgtgccccaaggccagaaagttaaaaggaacctcacaacagggtcaggaactatcccacctccccatctaccaatcagtctgaactgataatgggagatgctgatacttgctttactcatcctcattcccagttcatttattcttcattaattcagtccaatctccccaggggtcacttaaccccagaagcagactgatctctattcttcttaatcaggaaagtccaaagcactccctgtcctctccctcatatcagacttcagctctgcatctgcaagatgcagaggtcctctgcaaggcaggtgtcttcccacagggtcagcccctaaacactggctgcagatgtccccctccatcccttcccagccctttctgtgttgctgtgaatctgtccatcaccgagaactggtggggagatgtgggggaggtggggagatttctttgtgctgtgtcaaggcatgaagacagacctctccttctctcttgaacctcatactctatcccttcccagacacttgaaataaaacacagaccagaaatgtctacttaaagggtaaatttctatagtataaaattatgaagacatagtagatatgaggtaatgcatgagagtgtgacagggtgaggggacctcaaggtgccaggaaagctggtcctgggctccccagaaggagccgtaaccaggacactcactcataaatctcatttataataataatacaatgaccgcatatgtaatatattaaaatataatcaaatgataacaaaaataatgtggcacagctgcaaacccctcatatatactaacgcttttcatccacccaaccacaagaaataaatgctgttagtttccccatttcatagatgaggaaactgaggcaccaagtgggaaagtgctggtgagacctgggcagggagttgaattctggccatctggctgcagagtgtagctgccctcagtggagccagtagacccaggagttgacaccagagactgaaatcccagctgtgcactgccctggtggtctcctgtcccaaccgggcgttgatccgggccttgcaggctcacgtgctctgcagaaaatagagaaaccaataaatgctcccctgggtgcagagtgctgctttttactccctgaggatttctccctcctcagtcactccaaaatcagattcaccctttctctgagggaagatgatgctcccacatttttctccctcctatggcacttttcccagcccctgccagtcccctcccatgacttcatgaagatcagcacttgccctgtgcccactatgcactctgtaaggactgaaagggccgcaggactaaatgacaagactccagaagaaactcagtgccctcccctcctctcaagcctggccagctcggacacagtgggaggcctccccagagagaggccctggctccacgtacttccaggcctgggctgggtcacacacaaggcctttctctccctctttccccaggccctcctttcctgcagaagcacctgcacaccagggcaggccctgcccactgtgggttccgccctccacctacagctcagtgttcctccccttccagtcctgagcaggcagctcctacctggagagcccaccaggaagcccagcaggcctgtcaggcccaggatggaaacacgtggctgccatggggtctgcacctgacctgaccctggagacccccttgctcaagaaggctctgcttcccttgacacccaggtccatgacctgcacttgggatgccctgctcctgcctggtccactcatccctggaaatccagctccaccccagggctgctgcttggtgaggctgcaaggccttcctgtctggttcctagcagggattccacccaggccactgccctcacacccacagaggatcttcttcttctccctatggaataagggatttcttgagacccctcagcctgaggctgcctccgcccactctgcacctggggattgccacagccacagccaccatctcccacatggacccttctagagagagagtttcaaatttgaattcctgttccattcaatatgctttacagcatcggtattggaggaaatcctattaagaatatccagctgaaattatgaacatctttattggacatcaacattgaaagcaggaattttgagaaattagcatgtgattttcacaacctttttctggccaatgccccagtgacctacaaggaaacctttactgcccacagggaaccagaactgacaattcctctacgggagatgctgcaggtgagagcaggagcaaccagacctgcactgcccctgctgtgggtgccccaaaaaacatggtcctggggactgtgttcctgggggctagacaaggtaacacttggacatatgatgaaaatagggaccacagctgccctgacaaggagctggttcctgcttcccaaatggcccagggatgtctgcttatatactcctccataacatctgcacagaaactcagggaggcagggccatgtggtgggaacctccagtgatgcagaggacatgatacccccaagacagctcctggaggaggcccatggggagctgcaaagtggacagagatggctgtgtgcactcaggaccctccctgttacaaggggacctcaaaggggctgcacaggcaggcctcccagtctgggcttcgtgggtctttttcttggtgtcctcctgatggctggagaaacaggagagagggatgcagagaggaagagactaggggcaccgcctctcctcagattcctctccagtttctagcccctccccagatcacagccgcctttactatttactcccactgaagccatgatcatccaggccctcagcaatcagcacgtgattctcaactcaccccacctggacgcaccgtggtgagcccaagaaacaagagagaccaggatggggacagagcaggtgccacagccctccctgctgcccactcctcacctgcagcaggaggaggccaccgctggacatttgagggccgtggcccagccctggcttgggcaggacttaggggtgtagatggagatgtggctcccattcccctcccaaataccccaatgtccatcccctgttccaggaccttgttacctacatgtctatctgtgcaggagctatgaggggaccctgctgcccagagaggagtccttccatctccagccactgccccgttttctcacctggactctgcagctgatgttgtcttcttcttgcaccaaaggacacagagaatactactactactactaatactaataataatgacagtagcaatagcagcatacagaatggctgccattgactctgaagcaccagggccttctctaaaaaaagggccttgtgacacactgagcacgcaaagccacagccgtccctgctatccccaccctggcctgacctccctaggtcgaaacccttgagagttgccccaggctcaccagagggcacagggtgagtgctgtgattccctctgtgtcccatgtagcaggtgaacctctgctcctctcctcggggaatcctggtggccatgcaggtctggtaggtcccattcccattgggcaggacacccctagactgctgggcatcctggctcaaagatgcctcatcctgatgccaggtcagagagatattccagggatagaagatggaggccagcacatcatggtgacattgccttctaaggccccactgtgcatctcattcactgtgggggtcattggagacaaaagggcagagccagtgaggcatgtggccaagcctttctcccctctaagggagatgcagggaacaggactggtcctctctattgttctgactctcgctgaaacccacactgaccccagaccttctgcaaatcggtccttacctggggtccaattcccctaggcttgctggaagatgggcctcaggactgtggcctcacactctgggactccggctttgatgctgaggagagggttgtcaggggtgggctcctgggtcgtggggctaggaggtagctctccaggatgggcaggctgggaggcaaatgaggcagccctggccttgaggccttcctttcctgcctaatgcccaccccaggttcaggcttctataggaggacccactactttcacagtacctgtttttctgatacctccagaatttcagatatcaccatagcttttgcatgtagtctgcctgcacagggcaatagtgtgtcttggtctgcatggcattttcctcccagaaatttgtgacattcatagccaaagtctgagttctggaggaccggggcactgtccattactgagtctccaggttgggagagaggaagagcttcccatatgtgtagaaatgcctaaagcccctggtgctgctggcttcctgatctcacaaaccctaatctcctggagggaatgcaaggctgcctgcccctacccagcagtgacttctccattccagtccaagtgaggaactcggaccaggaaggacccctccctggccctcttccatccctccctgtgtgggctgagccccgctgagcaccattcctcacccctactcacagccaaatccagtgggaagagacaggtcctgctctctgcccccaactctcctggaaaaggcctctcccattactcttgcccactgcccactctcacctcctttctggcccttgatatgagccagggtcctcctgagctcctgcccattctctgtcaagtcttcagtctctgtgtcccaggtctcagctcccaggactgcttctgcccactgtccccggggccctgccctgcctttctgcctgtcacagagcaggaagagctgaccatccagatgtccctcagcgagaaaccctgactgcacagatccatcctgggacagcaccgtgaggttgtaacaaagactgtggggctctggggaagaggaaatcacagatgaaacttcttcctggaagtaacttcacatcaatgtttaacacacaggtctgctgtcccgaccttcctgaggaggcaggaaatgcacacgggcaaagggacaagaatgaggatttcagacgcaaggaaaactgggaaggtgggaggatagaggaggggactgaggaacagaagaagggggaatggggatggcaaacttgtaggccaggtgccagggcagggcagccacaggccccctcaggatatagggaggaggccaatggaaggggctgccctgcaggttcaagggaggagcatgaaggcagtggtggaaggaaggtcttgccagaggggagagcagaaactgtaagggacccaggctcagagggacccatgaccaccatggctgtggtgcacaggtgagggtgagatggaggcaaggtccactgcctttgaggaaggctcaacatggacaaggtgggggcaagggagacttggctgtgaggcaggaggggcaggtaggctgtggtgccagagacgttttctacgaggtccgtatcccagggagaagcaatggtgtgggcttcagagtggcatggcaatgccccaagtagggaggtggatggaccagttggtgtcccctggggtgggctggtggcaagggtcttaaagagtcagtgcatcttttcaacaaatggtgctaggaaaaccagatgttcacatgccaaaaaaaaaaaaaatgaagttggatccctaacttacaccacatatgaaaattaactaagaaaaacatcaaagacctaaactcaagaactaaaactgaaaaactcttacaataaaacatagggaattatcttcatgccatagaatttgatagcactttcttggatataacaccaaagatacaacaacaaagaaaaaattgataaattggactcatcaaaataaaaaagttcattaaaaacacaataaacacagtgaaaaagcaacccccagaatgaaagaaaatatttgcaaatcatatatatctgataagagattaatatccagaatacataaagaactcctacaactcaaacaggagacattcaactaatacaaaagtaggcaaaggacttgcatagccaattccccaaacaagatgtacaaatggccaacagacacatgaaaagacgctcagcatcagcagtcattagggaaatgcaaatcaaaaccacaatgaactattactttacaccaattagtttggctattatcaaacacacacacacacacacacacacacacacacagaaatatcaagtttggcaaacaggttgcgaaactggaacctttgtgtaatgcatttggaaatacaaaatagggcacctgttatggaaaacagtgtgttgattcctccaaaaattaaaaaatgaattaccagctaggtgtggtggctcacgcctgtaatcccagcacttcgggaggcttaggcaggcagatcacgaggtcaggagattgagaccatcccggtcaacatggtgaaacccagtctctattaaaatacaaaatattagccgggtgtggtggtgggcacttgtaatcccagctacttaggaggctaaggcaggggaatcacttgaatccgggaggcggagcttgcagtgagccgagaccgcgccactgcactccaactttggcgacagagggaggcgccgtctaaaaaaaaaaaaaaaaaaaaaaaaaaaaaagaagcagttggacacacggcctgtgttgggtctgggtagaggaggacagatgtgcagggcaaggactggaggatggggtgagcatggtgtgggggtgaccctgggggaactttggttagggtgaggacaggaggggagggtgctctgagtgagggtggggcttgggaaagatgagaacttgctgagggcccaaggcagctgggcaagaggtaggagcagcacaaggtcccaaggcggagaggggcggagggaccagggagggatggtccagcacccgtgggctggagtggggggtcctcaagagggtggggctgaggatgaaggagtagggaaggggccaccgtgaggcagggcccagagcaggcacctgcactagaggggagggggcatctgccctgccctgtgccctgcctaaggcccaaccaacattagcactagggctccccttgggtggtctagaggggagtgggacggagggaagaccctgggacaaaaggcggcaccagagagttagggtcagggagagttgggagtgggaggcataggggcagccctgggttaaggctgcttctaggaaaggcccataagggaggcaggagggacctgcggtggcgggggcaggggatgaggcagaggacatcctagaaatgtatcagagaactgcagataggaaggggtaacagggagctgggagggcaacaggacccaaggtgccctgagggcaggggaggaggtgggagggaatctggtgtccttagatcactggagttaatagtagcagggaaggatgcaagacaagagaggatccccggcagcgggaggccaggggagaatgagctggggatgagagaagtcgcaggaagaatcctctgcccggagcctgcagactccaacccctcagcgtgagggtcaggagccccacagtccccacagcagcaggaagcactagctccgggtcccgagaaaggagggccccaactccaggagatgcggcccaggagctgagaacacgtcggctccgggagaggacagggcttcagggaccttagggccgcccccagcaccgggggaggtggctgcctcagcggccgcgctggaagggccctcgaatgccattcacaggagcagcccaggaacccaggggcctcagaaagactggtttgtccgaaaagtgagaggagacggaggagaggagaggagagaaagtgcaggacaagaccagaaaatgcagggggcgggtgatgagcgatcccgaggaggactgaaaagagacgtggaagcagggttgaggtgtggcgggaacgggccgcgtccactccccgcacccccgacagcgcacctgagccccgcctcggccgcacagcgctcgccgctacccacccggacccccagaaacgccccgccgctgccgctccgccgaggaccgccaggaaccccacttaccagcagcagctccctggggtgcaaaaagggcagtgcggatcaggaacagcaggactaggctcatctccatggcccagactttgctttcctcgcagtggctcaagcggctgccaacccagcggagccgcgaaggcccaccagaaatttcctgtcacctggccccaccccagcgaccgctcacccaatgaaaactggcgcccgcagcttagggccaatcacgagctgggagggcggggccacactcagaaggggaaggttccagcggtcaggagacctggagaactttggctggcgggacctggagcccagaaaagggggagcgcgcggaagcgccgccaaatgcggggactggctccgagcagctgagagtacagccccaaccgcatgagcacgacctgggccctgccgccctccctgtattgcgaccaccccatccccgcacccccacccctaggatagcgtgcctcaccaagaccgtttcgccagccaccccatcaagctgactgtcattcgcttgttctttccaggacacacttacagaagagacgaggcctggttattcttccaacacactcccctcagccgcgcacagcgttactggctatgtggccagtgaccagatttgcagacctgtttccagacctcagctacctctgtttctgtagcacctgccccagctgatccgctaagacgacaaatctcttagacgtttcagctttacaatctccttctcctcccttttactcaaagctaggtcccctttcttatggtcacttcctgtaagtgtgtgaggtctcccggggctgcctctctattcagcccctgggtgatcaaaaggccaaggaggcagcttgccagtgtccactccaacaccaagctctccccagactcccttttccagcctgctttaggacatctgtacctctgagaccatagtagcttccaatgtgacaggtctacaaggacactctacacgtctcgcatgacatcatcctctcttcctcccctgtttctctttccgtggtgccttctgatttcccccttttccttctcaagtactcaaagctcctccaaccctattttgatcccacagccactactttagtctcggctttcagcctagatcactgcacaagattcagcctagatcactgtacaggcttcctaaacactgtgactgtcccagctatagtcagagtgctctaagacccccacagcaccccatctgctgaatgtcacacgtgaggtctctaccatggaagccacagctgccacaacctcctgtctgtcaccacccccatttttctggtgacatccctctttccagtgttgcagtaaaagtgggctccccaatctccttgccctgtcccaccgggatgccactgcctaagcagtctcctgcttccagattactgtcgcttctgcctctgagcccattagaccgtgtcacatccttaaatcttcccaattaggctggtcagagtgtagtggtgtttacaactaattgatcacaaccaattacagatttcttttttccttctccgctcccactgctttacttgactagcctttaaaaaaagaaaatcttcccaattagataatagcaactgtggcacgatgttgtgattatgctaaaagccactgaccagtacatttttttttttttaaccaggaacacatgcactttattgaatgccattgtagaagagtgtgtgaggataaagcgctgatacagaactcagctctggggccaggacgaggaatggaagttggagtatgtggaatacaggtcatgggcagagctcctggcctggatgatgcctcctgatctatcgacagacttggaagatcaacactaggatgatgacggtgagcagaatggtcatgatgatgcacacaatcagggctcagatgttcaggtacttggcagtggaggcataggcctgggccccagtcaggtctccaaccatcttcctgtccctagacttcagggagtaggtgaatgctatgaatcccaggcagtgggggttcatgaagaggatgttggacagggaccagacaacatagtcagacacggaggtctcgctgcagatatggatcatggtggacattgggggagcagggttgtggggcgcccccagcacagccacctcatgctcctccttgagcatctcatagctggggttggggggcgggggagggcagccactgttggcaggaatgaagaaggtttgggcagtgtggttcatggtgtccagcaaagaccagctgtggtcaggttgctgggatggttctgagtgggccctggactgtacatttttaaatggtaaattacgtggcacataaattatatctcgataataaaacaccatgcaaaagcctctttctactgaaagaatcatctcgtccccaacacacacgtctcttactctttggaacatctagccagtggtcctcaaacctagccacttcacagaaccacctggagagtttttaatatccacggtcccaggtcacagccaaaaccaattgaatcagtaaggctaggttggacctaagcttcaatatcttttaaagctctctacgtgcttccaatgtgtaggcaagttttagaaccactgttctagcccatggtttgaacctccctgatgggtaccaactttgcctgcattcttgaactccatctactatttatttatttatttatttttaagagggggagatctcactctgccgccagttggagggcatcagtgtgatcacagctcactgcagcttcagatgcctgggcccaagcaatccagccacttcagcctcctgagtacctgggactgtaggtgagtgccaccatgcccagctgtcatctaccatcttgtaccatccctcactacacgatgaacagtccatgatctggaactgtgttcattctatctttgtcactcttacaaacattttttaaaactgaactatacctataattactaaccattcctcttaaaactcctagcctacacatttctgtgagtgaaaatttaagcatcacagggttttaacaattacttagatttcccatccacattcactgattatttattttgatcatcataatctattgcgcacagcagggactggggtcctgtccccaccttagggggattatttacactcctaaagattacaagagtagtgaggggcagagaggtggtctcagctctcctgacacaggtctcccttccctccacagtgtctaccctccctccaggacgaccttcctccctgtgccagctctagcaaagggtctcattcagctcacctcaaaaaatacttttaatacttaaataacgacaataataataatatacaaggttagttccaaggcatgtagaggtgatggccagcagaggtgaagccaatccaccctttctgggctaggggaagcccagatggtcttccgctcgctcggggtgaggcactccccagggtcccggcctggctgcccatcccccaccaagtctcccaggccttctgtccaatgccctctccctccaccccacctccagccccttctgctctgccccatcaactacgttttcttcctcaggactcgccttagacctctgaactccggggcacagaggcgactttctcctcacagactttaggcgccactgctgggtccggaaaagaaagagaaaggacccagtgcggtcgcttacagaacccagggcggggttgggctgggcgcccgcgcgcgttttcaagcctgcggcccggagttcactgcgaggactgagatcacccgttaccccgccctggtctacaagtgtttgctgatatagaaacggaataacggcgctgtgggctggggaggacggagttgccttcaggcttctggtctccagccgcggggcactcacagctgccgctatgaaaatgcagacctgtggggcaggaattccgagtccggggtggagcgcgatgtggaatctgactcgcttgaaacagcaccgcggtggattcggatccgggtgagtagggaaatgcgcctcagcccctcccacgggccgcccacggattccaggatccgaaaacgcttccagctgctccgccaccccaggaaggcagcgcctgcctctgggcggttctgacggaaactggctcctccgcctgcaggaaaactcacaactaaggggccaggagaaagcctctcagggtcccgccccttcagtgaggatcctaaatttacatcccgagtgtggccccatcaaagactggagcgacgttcactgaaatgatacaagaccagcaggggcgcagggcgctgcggccctcagaatgcggtgacagcgccgcctcgcgtcccttccccgacctgccccaggcggacgcggtgacgtgtgttggcctcgaggctggaatacaccggggatcaagtgcagagaagggagaaagtagggaaggatggctggggggtgggggtggggggagcgtgttgaagaaaaaagggaagagagaggaaggaaagaggagaaaaaaggtgaagaagagaataacatttaaaatatagagttttattatttctaacttttatttttggtttttatctagttttggtatgtatgaatattcttaacatagctttatctctgtctctctctctgaatctgtaaatatacagtaatatatatacacgtaagcctctacctgccgatgtgtcagggtgtgtctcttgggcacaaaaacaaggtttttgttttgttttgttttacataagcaaagtacaaatctcaaagaagatatattttaaaagccattttattgggacttgctttgcatacaataaaatgtatctaaaatgtatctatttgaaatgcatagctcgttgtgttttggctgttgtacacacccacatctccactaccacaatgaagatgtagaacatttccatcggactccaaagagctgctatgcaatacaattttatagggtcaataaaagaggtaagatcagttttaagtattgttatgagaagatgtgtgcgtctcatacttttaaccattttttaaaagatgaggatacactgaattataatgccagtaataccacttccataatgtatattttaagtagggaaaaacctggaagatttctcaccaaagttttatttatttatttattttttgagacagagtctagctctgtcgcccaggctggagtgcagtggcgagatctcggctcactgcaagctccgcctcctgggttcacgccattctcctgggttcacgccatcctcctgcctcagcctcccgagtagctgggactacagacgcccgccaccacactaattttttgtatttttttgtatttttttttttggtagagacggggtttcaccgtgttggccaggatagtctcgatctcctgacctcgtgatctgcccgcctcggcctcccaaagtgctgggattacagtcgtgagccaccgcgcctggccttttttttttttttttttttttttttttctgagacggagtttcgctcttgtcgcccaggctggagtgcagtggtgcgatcttggctcactgcaacctccacctccagggttcaagtgattctcctgcctcagcctccctagtagctggaattacagtcactcgccaccatacccatctaattttttgtgtttttagtagagatggggtttcgccatgttggacaggctggtctcgaactcctgacctcaggtgatccacccgcctcagcctcccagagtgctgggattacaggcgtgagccactgagccctcaccaaagtcttgacagtgactccagggactacaataacttggtgattttcactttctctgaaatgttggaattttatattacagtattaacttggatttggcttggcccggtggtttgtacctgtaatttcagctctggaaggtgaggcagaattgcttgagaccaggagttcgaggctgcattgagctatgattgtgttactgcactccagcctgggtgacgaatggagacattgtttcaaaaaaagaaaaataaatgcaattaaaaataaaaataaacctgaatttgtatggaggttaaggaagagtatatctcagtttgaaacattatgaagctaagccccaaacccaaatagttagagatttttaaataccaaagtgttaattaaaactcaacaccagaaactctcttttaagagtatccttcatattttcatggcattgactctttcttagtgtctttgacagaaatgtttttagtggagtagagatacatgtaataaaatttacagaagggctataataaagagggaaacgcaaaatcgagtctgacacaggagaccctgttccatttatactcaaagcaactttgaaaactgcgccgtcatggtgtctttgggttgagacaaagtcgaagcaaattttgttcctagagtattgatttcccctttccaatggctaaaggctttcggaactagtctgaaaactcaggctctgactttggatctaaagaagtgtcaagaatgtgcgggcagtggcgctgcatgaatctagcgggtctgggcgatgctctctccggctctacccagtagcaactgcggtaaggacaggacgcagcgaaattgtaccagtgagtcagaggccaaaggaggaatcctggcccaacagcgcagagtgtgctttgttaaggtggggatcaggtagcggagggaaggcaaggacactcagggaataaatggcagaggaagaaggcgcgcgagggaagacccaaagccttccgacccctccttcctttccttcctgttggggttgaagggcaccagccggtggggtgcagagaatgggaacaactagagagggcgtgccccacacaggcgtcccggctcccttctcccagctactactgatgagttcaaactaggaggacactaagacgtgtcttttgcaaggtagactccttatctcgcactctgtctggttttctaagtccatcctaatgaaacacaaaaaccaagagccaaattctgcgtgtgacttttctgaccactataaggtcctcctcctccccatttcttgcgtgcttcccccttgcctcgccccctcccctttgtctccacttccccgctcctaagtatctcctgctttcttcagaggacttctcatgaagtacagactcctccacctccaggaaaaagagacaaagtccactgagaaggacctgagggatgcctgtgaccccgcccctgaggtcagcccctcccgcatcgctggctttggctctgtatgtgtgtgtgtgtgtgtgtgtgtgtgtgtgtgtgtgtttgtgtgtgcgcgcgcgcttgtgtgtgtgtctgtgtgaatgttaatggagagtcaaagtgctaaactcggcatctatcataggaaactttctcaccttggcactgcatgcaagagtcagtgtatttatgtgcacctgtgcctttatttcaggagctggaacaattttattcatcagatccgcagagtgccaacgcccccaccccagaaagcttaagggactctgcattagagaagagggtgagattggaggggcccctgactccaaatctcctgatcccccctccacaaagagatgctgaaaaaaagtgctggacaatccattccctcctgggaccagacaggaagccagaggcaccgtggatgtcaaattccagcaaagaaacaattacagcaaaatctccatgtcacatttttaagcttacacaatggctcaaatagaaccagcatcaaaaatcccgaattcctggttcaggtgggatcactgaagtctgctgttaggcttggcaggacctgcaggtagaaagaatggcatctctatttagagctgcagcccagtagcccctgcttcttgggctctttgaaaagaccctctcccttcagcagtgcacagtgaggccatttctggggaagaaatgtagactctccttgggggaggttttatacttagttactgactttgcattcgttgacttcatctttgaacatcttacagttacgtaatttgctttgactctaagtgtagaacaaggaactgttcctgaagcagaaaactaagggttggtgacctgcactgtcacccctctccatggtgctctgatgcaataaaattgtgagccaacaaatccatggataggtaaacagtaaaccatttcagcaaatgtttcagatgctccttcgtgcctagcaatgtgctagctttaccccagccttaacattctaaagtttatattttccttggtgttgtttttaaaataattcatgtatatttattaccatgggtttgttgctgtaaactcctgggaatgaactgtagaattaagttaagtaaataaatgtgtgattctccattgacttattgctaacaccatcttaaatatttgaccccaaatccaatcacttctcactcctctactactttaccccagagccaatcctctctaggatagtaaatcagatgggccttccagctgggctgcctgctgcttctcacacctgctgtccatcacccatgcaacaggcagagcgagcctttcaaatgggaattacggcacatcctcaccatcacatcccacagacactccatcctcttcctttcttagtgcaatgaaatcccagtctcccaccatttcctactagcccctcaacacagggcatctgtggcctcatcccactactctcaatagagcttgctggtctccattcacaccagcctcttgtcactgctctgttcttgtctctggcttagagctacttcctgctatggtccttggacttgtgatgtgcaagaagttctcaggtatgggagggactagaatgatggctttgccccatctcacatgtagggatcccgctgctcttgggggatttgctgagtcacttctccctgtttctgctggggctggggatggttaacccagtcaagccacacaccctgagaggaaaccaggtagacaggctgactgacaaggagggcactgcctgtcaagtggccaatgaccccagtcagaagaggtgaagggtgagagaggaggctgctgggaaccagaagcttggcagccaggaagactgagaacaatcaggctgacagtagaggccagaggttgcagaccctgggagtcagctgtgctgttcactctaagccccagggtgtgggggagggtcctttacaccagggagcttcaggtctcgtgactgtttctgggctctgtactctcctgatcctccatgaggattttaaacagtgagataaggtatccagggccccagaaatctgaattacctttaccaaagagatcatccttccatttcatttcttataagatatgaaatattaaatcaaactaatacaggattaatgtgaagctagcaggtgttttgtggatggattcccctggctgtttatactgggggaagaaacaggcctggccccattcacagatgagaacaatagggtagccatactcagaggacctcaatactgggtgctcccaaccctgcaggaaagaccctccctgcaaacagatgtacaggagggtgactgcaggatcccatgctgtctctttctcctctcctgaatcctgggtttaccttcctaatttcagctaagtagctatattaaccagttatttaagactcacagggcccctctctaccatggcacctaacagggtcttccctcctcaaaagaacttcaggaggggtctactcaataaaaagcagcatggaaagggcggtaggggcagctcatctctaactcctgaaatagacaggatggagccaccgtctcattcctcacttatcccatggtcctgcctcaaatacagtctcctcctgcaggctctgctgggtctttttattatcattctccaggtggtgaccgggtccctgatgctgatgtggtgctcacagcttcctgaaatatgacccttggggcccaacaccaacaggagttgaggccggggagcagcttcaagctgtaggggatctttggatttgaaagtaggggttggtcatgggctgtctgtaatgctcagggtgtcaaggctgagagtggctgagctgaatctgctcattagcatgttctccactgtttgagagctgccttgtgcagaccagcaagacacagattgttcacagctccccttgtctcttggaagaccctgacttctctttccccagctgtgcagctgatgagctctatctcctcccaagcatagcaaggggaggatggtgggagtgaggcccactcctctgatgccccagaaccccttccacataatctcaatatccaggcctggtgtatctccctggaccatcatttcttttctgggaatgaaagggttataatatctgcctcctagatttcccttgtcactcactcaccctgaatagacttcttactctattagttattgttctcatatcatttctttgaagctgtggtaaaatattatcagccattaataaaacatggaggttaggttctctttttggattctgaggatctgctgtgctggggcaggggcaggtggggagagaagggcgggtggagggccaggtgctgagtggtgtgtggcctcgctctgtgctcaacaaagctcctgctgtggtcatttcctgtttatttgtctggatctctccttgcattgtgattggtgcctggtctttaggggtgggtgctgctccaggtcggaggcctcacacaactccaggctgagcctttcttcaagtccatggaggtcaagggcagatactggcagctctccatcctgccctcgcctccactttatctggcatatttttatatgttgatctgatcctcctcataagggatgtatatgagcattattttgtaggagagccgctatgtcccacagtggccatgctctgtccctgacaccaggatcctgtgtgctttgttgttgtcgtcccctaaagacccaggacagcctctgcacatggggcttctcagatgacacagattgatcgttcccacctctgccttctttcctgttccatttccagaatgcttctattgtttcccttttattgtagtaagtcaaatttttgaattaaggcctgggcacactcactcacgcctgtaatcttagcactttgggaaggctaaggcaaagggattgcttgaggccagtagttaaagaccaacctcggcaacataacaagacccagtctcttccaaaacaaattgaattcgcattgtgaatagatatgttattgccatgtcataaataaattcttgtccctttttctgtgggagcaccctgtggtctgggtcctggcaggaaagagatggcacagaaggaagacacgttttaaagaggttctggcagggctaagaaagtcacaaggggcactgaagctccctgggatgatctgtagcaggaaatggtttgcatttctgagcttgaaagagcaaggaagggagcagtttctagaactccggcaaatctgtagctttcactaggggcagcccggcatgcctatggctgtggatagaggcctgaagtgattacagaatcacagagctgcccagagtaagagagggaaatgaaaaccctgagttactcctcctcccacactcccatctcctgcaggtgcctgttatcatccacacccaagcacaagccagatggtgaaggagcacaggccatgtcgtctgtctgtcatagttgcctcccagtgtagggggcaggatggaagagagtggatgatggctctgtgaggagatggaagctgagaataatgcacttgcttacagtgttcacattcttcatggaatttacttaaatacactagcatttgctctaatccaaaattatacctttaaaaagcaacgtttcggccaggcatgatgactcacgcctgtaatcccagtactttgggaggccgaggcgggtggatcacctgaggtcaggagttcgagactagcctggccaaagtggtgaaaccctgtctccactaaaaatgcaaaaattagctgggcatgatggtgggtgcctgtaacctcagctacttgagaggctgaggtaagagaattgcttcaacccaggaggcagaggctgcagtgagccaaaatcatgccactgcactccagcctgagtgacagagtgagactccgtctcaaaaaaaaaaaaaaaaaaaatcatgtatatatgcttagcaggtagtaacattgaagagtacctaactctccttccctatctccacatgggacgtataactcataaataaataacttaaattatttgagtataagccataaaagcagagtctggctcatataagcaaaaggaagttgctgggcagctgtgggtgaggttcacagaatcatagatgcttccaaagtaccaggacagcaccaaggagcaggcagcaagccctgaccagtctcactggactcacctgtggagtgggagaattgtcactgtttcctgatatcttgtcattgctgagctttaaattctggaatagtttacttaaatggcttagtttggatctcataaatttcttatttgctcgtgatttaatttcagggatagagtcaatatttgaatttgactctatccctaaaaatgaattcaattttgaagttgaatccaaattccatttcaaggatagagtcaataggaatagagtcaatgttttcccttaatgggagctccttttctccatttatcttcttaaagcagggggaaggggatgagtctttcaagttcccatggacccatggacatcatgagatcaacctaattgccctcattccattttcctttactttgcagaaaagaaacaaattcctttccacccaaaatatgacagcgcctgtggtccagggctcgagcctatagtggatgcccagcagccaacttcctggaattgagacctccccagcaggcttgggggtgaaaagagaaactagactccaaaagggacccagtgctctgttggggagagaggagcacaccactgcatcccaccctgaagaatgggagtgagaagagaggacaggtgaacccaccatggctccagtgagatgggagcggggaacgcccaagaaggaggacagccatggggtggcccgagccaaagccaccagacatcattacatgtctggggccctctcaggccgacatgagttttactgctccacacactcttttgttaagagctagctgtcagtagatcagtgagagagcaactttgatacagaggaaaccatgcctgaatgggtcagcccagaagaatttagtagtaggttctatgcttccctccagggcctcatgggcgtgggcaacttttttttttttccagccactcaccctaggtaatgaagaaagctctctgaactgtgtccttgctgggcacacaggcccctaccacatgtacatggcgtgggagtcatggctaaggcagggtgagactcctatttgaggccaggaaaagctaatgaccctacatttggttcagtccttgtggggtcctgactagggtgtgggccactgtgttcccacagatgctctgttagcccttaggctgtgagatacacaggcaaatgttatattgaagcctttgtttctcttacactgaggtaacactactgcagcagagcaaaccttattgtatcagtgcaccaaccccaagttcatgttcattacagcaggaaaaactaacatgtggtgaattctgcctccacaagggacaaggacctgataagactacaatgaccaggatggccaatatccctgtcttcttgcaactcaagctttgcctggttaccccctacttgccccaactccttggactccagccctccgaggacagccagacatctgaaggaagtgccaggcacagatgccaggttgcataagtgctgacccctgagcaactggagaagctgttaggtcccagctggcctagagatccctggctcagggagtataactggatgccttgaacaaagatatggggtcactggaaagagaggaccggctgtccctccccactaagaaataattaactgttagatgagggggaattccttttcaagggctctgtggactgtgctgctctggagggggtggggagagggaggagccctgaggtctgggctggggtgtggttgggaaggagctgagagctgagagctgtaactacccaaggagctgcaggggtgaggttggtgcagggtgggatttagaggatttcccccagactcctgtgctgatccccttcatctcctccacccccacccttggtgtccgtcaacatgcgggggtgccctcatcttcccactgcccctggagctgttctactcttccacgcttgccttggggttttcagagcagcatctttgtgagtcctggagtgctagggaccaggaggggagaggaggcaatagcctcctttaatttggcaacagcttttcgttatcatctccactttccaaggcaggaaaagtgtaggcaacagctccgagagatcctggaagaggaaacaccatggcaggtgaggcagggagctgtctgagtttcctagcagacatcaggagcccgcccttccaggcctgggctttgcttcagtgcctggccctgcataggcccctgcccctgtcccgttctgctgcccccacctccctctcagcctggccccagacagaatccagaccaactcctgtctgctgtgaaaaatgttcctgccagtttaggcagatcttgctttagagcactggtgcccagccttccacaggtcttgtgtctgtttttcttggcactatgtttcttctcatgtattcttctgaattggcaaggcaggaattacatcactggtttgcagatgaggaaactgactcatatggtttcattcagcactcattcactgtgaaagtgtctgtcagggccaattgtgggccagatgtgcccagggttctatagctagctggtggaaaggcctgaagggttcatattcaggtccacttgacttgaaaactcatattgaccttacttatgtactaattcccactttacaatccatgccacaaactttgttgtcttaagaagttgccacagcagccttcagcagccaccttgtgatcagtcagcagtcatcaacattgaggcaagaccctactccagcaaaaacattagtattagctgaagcctcagatgactgttagcattttttagcagtagtgtaatttttaattaaggtatgtacatatctattttatacataatgctattgtatacttaataggctaaagtataaatataacttttatgtacactacaaaaacaaaaaaattgtgtgacttgttttgtttgcatgatctgaaaccaaatctgcaatctctctgagatatgtctgtaatttccctttccctcttcttgctggcccagaatgaccttgtttcttgtccctgtctagccctgcctgttacaggggtttgccttctctggtaggtctggacactttgtattccctgtaaccttgcctcctggcatatgacactagtactagcctcaagctctgttggattagcgagcctcactccacacctcctgaactagaaccaaagctctgtgcacacaccattcatgtgagtctgtagagatctcagcttcctgcaaggtgttctgaaaggatgttctgttgtgactggagggcatagccacaggtctctgggcagaggtggctcagaaaagagtgggtggccccagtttgggtcatctgggaaggggaagattttcagataaaaacccatgccttagaagacaaaactacccaagagctggcagcagctaaccagcttgctatctgggatatcactctgcagtgggagggaagatagcctctaccatggtgtaggggtccagggaccaggcagggaggtcttcctagtggtcagtgcttctcacagttgggagatgaatcacctttcgatgaggccaaagacctcatgttcctcactagctgacttgttcccactcagtggaaaaagaacccagaacctttgcaaaattttaggagagaaggactttccctcttgtctcttagtgccagggttatgcatgactcatacttgaattgcaatgtgtacacagcttaaagtcttaattattagaacataagaggcccaaaccactgttgttatagatatgtaaaactatgcagtacaaaattaaacaacccccaaccaattaagagtggagataaattatcaatatttgtaaatttaaaacaagatcgacagccctttagaaaaacaacaaaaaatgagacttttgcaagacaatctaaatgatacgctaataacaaaccttcatgaaaatgacatttcgaccatctgagtttctgctttaagttacaaattccaaaaggtactaatccccaataatttacagtagggagccctaagccacaaagaaaggtgtcagggcacacctgagacctgaagtgagaacataccctccctcagggtcacgagtgaatcctctaagacccctcctccctcagacactccatccagtcatcagaaggtccacacagcactaagacccaaccacctcactgtcttcacctccatggagagagcccaggtgacagccacgcctgctcctcctccctcatctcccacagcctcagcaccatcgtctgcctcgagtccaccaggactgagctcctcatgccctttccctgtttgtgtcagtcacactgggtcccccatatacccagcacttgcatccccacaaggctccgcacgctctattctgtccccccaccatgtcccctacctaactccagaaatcttccctctgtactccctggaatctggaatcctcagtccatgatcagcaaaacctcctcattctctctcaggatgctccctcacctcgaagctctagcaggaaccaggtcttcctgaggatgtgacccgctctgaagttcccctacatgggggagtttcccagcaacttatacccctgggttcagaggtgaggtggggtccttgctcttcactgtggttctcagacctttctgcctccctcctccctaaaacccctaagctgtcatcagactaaggcgccgctcccctcattgtagccattccctgtgggccccaagccattcctgtcaatcctaactcttgtagctcctagatcactgtcaccctctccagcagtgctgtctccttgattctttctgacttcaacatatgcagatgtgctgggctgagtactagtccccaaagagatccagtcttagtccttggagtcggtgaacaggttgcattgcatggcaaaagggacattactcatgtaatgaagataaaggaccttaaagtagggagatcatcctggactctctgtgtgggcccgatcaaatcacatgagccattaaaaggagagaatctgctctagatggagtcacatgctgcagagaaggaaggcagaggagacacagcaaaggggagatcagtggttccaagcaggaggattggatgtgctttaggcaccagagagaagtctctaggatctaagggtgctcccaaaaaggaagtgggaagctcagttctatctgcaggaagtgaattcagacaagaacctgaataagcttggatgtggactcttccccagattctccaggaaggagcacagacctgcccataccttgatcttagccccgtgagactgggtggacttgcaacccacacaactgtgacatgataattaggtgctgtttaaagctgcttggtttgtggtaatttttatggcagcaatagacacctatacagcagagaagatgccctcactccctggcctctcagatcctggaactccttttcttcattaccatctcctctctctgccggaatctcaggaccttgtcctcccctaggcctcatcatggcaaagaaccccagcccttccacactctcaatctcacacttcccactctctgaccatctttccactcatccccttgcagggtagccacaggctctgaagacactgatgctataatttgatcatatgctataatgtaacatcagtgaaccactcattgcatgtgtgcctgctttccaggcatggagtccattctgtagtacatctattccaataatttttccacccccttgaaattcccaatccagtgatgctgctatctattccttctcccttagtgtttgttgtcctctcctccctcctcatccattttggattctgtagtaaataatttccatccctcccttgcctctccctttcgttgtcacacttgcctggcaaaactacacagctagtggattccacctcagcctacactgcacctgcccccataagctgcaggaggctggagagcagcacacagcatgctgactgttctctctacattcacgacccaaacctcatggggagcccccaccatagccagcaatcaccctctccctgcatggctcactctcagcctcctcctggcctgggtgactcttacataccttctctctgtcctcacacatccaatcttccttccccattcttacttccgctgatgatcttgcttcctacttcactgagaaaactgaacacatttagaagacaacttcacagattccaccaccgtctgctcatgcatttgcagctgcaccacatgtcaggcattttactacatgggggattgctgtgtgttaaccatcctgctcccagccagagccagttcctctgctggtgccctgaacatcatcccttctcatctacttaaagtgttagttcatcaattaataccttttttttccctctattgtcatcccttttccttttattccagtggatcattgtggcactcatgaggatgcacatcccaggccctcaggtagaggaagaataattgatgatgtcccagctgtcgcagcctgaaatctattgtcacatttgatctgagaccacacctgccccagctttttccaaccaatgattgaccaaagcaggaaaactaaggcaagaatattcctactctgaaggctggctgaggctccaggactccctgccatccctactgagcttcccttagcctacacagggtctaggatgcttccagctgaccttcctgccctctctccttcactgggactcagagttgcattgtgatctgatggcttttccagcatttctgtctctatcctgattttctctcacaactatttcccctaataaatccttacacatttaatactgtattggggtctaagttcaggaccgcagctatcacaagtggtatcaagggtgatccatgaaaatgaccaaaactggaaatttgaaataagctttcccactgcctgtcaggccaagaggatgccatctaggttagcgggggacaaagaaagtccatagagaagttgcatctgagctgccgtgggtctcaccagtgctaacctgagaagatgctctggttaggggaagctatggcagatgtggtgatagaatgccctgcacaataatgatggagttgggggtaaacccacaaagacagtggagttggctggttacttcccagctgtgttgatgctctataaaaggataatgagaatctgcaggttgttaacagctgtcactggctatgtgtgagagtctctgcagtgtctcatggagaggcctttatctcctggatcaaaagagcagatagcatggaatggtagctgaacatcattatggtgggcacagtgctccagagacgtttgatactcagccaacacaggccttttataggaaagtcagggccctggtgggggaacctcagattctgcaaactagaacagagttatctgatgggtgccctcctccaggaacccctgggcatgcagaggaggctcacccttctctagtaatcgttcccacttcctatgctgaaagatgctacagaagcctcactcctacgatgcagcaggaatcccactcaggagctttgcaggaactagccagcatgtccccataggggcctggggtgcacttctgggattggaatttgagggcatttgatcaataaactagaatttcagtctggatgaataaaaatcctttggcttggaggcactttctcaggacatgggtttatcaaagaacccaggacatggggtaaacccactactggggtgagtccatatagactggaaaaaatgatgcccaactctcaacaaggtagatatgacctagttatcctggaacatgtagaggatgcaataacaaggctgagggaagtgggcgtgatgaaggcccaccaggaccatgctccacaagaggacccagagggcacaccttccaccagagcctcaggaacatgctgtggagagggacctgcatcactaagaagtgtcggggtgttatcctctgcaggctgggggggatgatagtaaaggtcccagagttgtgcttattcatatctctggggagaatgtgggcctgaagagactgagaacaagtggtggcagtgacctgcaaaagccggagggcatggttaccatggcaacctcagaggagcagccaaggggactcaagctgcagggagtgtggggaaagttagtagagaggacaccagggttacaagaggcagccaacaagggcactgcttgatatatatgataagaaagcaagaattgaggagcaggagactgagggtgttcgaccaaatacaaagccatgatccccttctcaatgcctagacctcaatcaagattcagactcagatctcagtgacagaggaggagtccatatccctagagaaaggaccctgggacaccatggagatatatggctgggacaattccctcagtctttcagcaagggaacctatagccatttactcaggagactgtacattggggaagggaaataggcagaactaggggggatcattttcattgcatgtaagctgatattgatgcccagatgcccacagcacaatcatcttctccatcacagtggggcttacggaggccagggagtaaacctggacacattatggcccgcaatgggaccactggatgcatagacccaaccctgattatcttccaattccctgagtgcataattgacactgatgctctggtaagtggagtcacccccacactgggtccccagtctgtggtataagggatctcttgatgccaaaggccaaagggaaacctctgaaactgcccccatcctggccaaatcaaaaatcatagtgtgtcccagcgtgggtcttgtgaaggacactgcaagtattgtgggggtcacaccaccattacaaagctgaaggaggcggggtggtgttgaggctgcctattgtctccgtgtaatccagcaatctgtccctgaggaagcctagtgaggcctaaagaatgaatgagattactccagatatggccaagtaggagttataagtgcagcttttgtgctgtctggatatcactggtagagcagattaacaaagccttgggcacacagtgtgcagctgtggatttggtgagtgcatttctttccattccaattacaaaggggatatggagtgattcacattcatgtgggatccacaacacattgaattatagtttgcctcaggacttttgtaactcccctgtcctctatagtatagtcttatgactatactagacatactggatatcctaaaggatattaaatcagctcatttcatttacaacttcatgttgactggggcgaatgagcagcaggtagaaagtgcactggcatcgttggcaaaacatttgcacttcagaaggtgaagataaaccttacagagcttcaggaaaggtcactgtagtgaagttttatgagtccagtgtttaggggaatgccaggggtgtcccctcctaggtaaattacaaagtgttgcattttgcatccttactgcaaaaaaagaaagcacactctccggtgagcctcttggagttctgacgacagcacattccacatgtagaaatgttgctttggcccacactctaggtgacataggaggaggccagcttcaagtgaggcctacacaggaaagcaccctgcagcagatacaggctgcggtgcagccaccatccctcagacctcttggtactggaaggggcaggggtggggaaagatgcaggatggagctgaaccaagcagcagtgggagagtcatggtggagggcctgggatctggagtaagatcatgtcatccacagcagagacatggctccccattagaagcaacttttagtgttcctggtcctgattcgatagaatgcttaaccacaggacaccaagcaacgatgtgattccaagtacctgtgtgaattggcttctgtgtgacccagaaagtcatagattggacaggcccaacagcattcatcatgaggtgaaaatggtccacctgggttgtgcttgaatcccatgttgacacccccagaaaacacccaagtctgaagcagcactgaacaaccaaacagacaaatggaagttagccagccttcactatgggtcaatgcaggcctggtaggatgggcacatgaatggagcaagcacagtggcaggcatgaggctacatatggggccagaagtactgactccccattatcaagacagatccagctgctgccacctctgaatgtccaactcatcagcatttgaggcccaccatgtgccctagtggggcactatttctttaggtgactaactagccactatgtaacaagttgactacatttagctacttccatcctagaagggcctgaggttcatcttcacaggggtaggctcatattccatgggtgagttttcctgtcctgctctcggacactcagccagcaccactctctgggtgctgttgacattcctgatccacaggctaggtggtgctcccaacccagtatctgcctgaaggacccacttggcagggaaagttccagtgtttccgtggctatgggtttcactgatctgatcaccatctgcaccacccaggggctgccagccacaaggaatgctggaaatgtcttctacaggcaaaactcagtgtcatcctggaggaagcactctgaggggtgggggccgtttttcaggacatggtgcattgtttgaatcagagacatctctacggtgctgtgttctcaataggaagaatatgtgggtctagaaaccgaaagttggaagcaggtttgtctccatgtccagtctcttagattcacccactggggtattttgcacgttttatctcccaactttgggctgttcagggcaggaggtccttaaaaagagacacatgacagcccattgaactacacattatggttgtcaccagagaagtttggacagtatgtgcccagagaccagctggtgagaaaaggagtctcttcctctccaggtgcaggtaatagatcctgatctccaggaggaggcatggctactttcacacaatgagggcagaagtgtgtgtgtgagaaccagagatctacttgggggccttctggtttgccttgtccctttgtaaatgtgagcagaatcatccagcaatccagcctgagaggatttgatttccaagggcccagacctctcaggacaggaggtttgagccacactcctgggtaatcacccaaggccccactcctgtgctctgacatcctcagtgtcattggtgcagagaccctgcttcccatgggctgttcccagccagtgatgggtcacaccagtgacactgaggcaggacattcctgggagaccagggactcctctgacggacagcagtggctcaaagactcctccatggctttgctcaactctcctgagattgcctgtggtctaggacacatccagtaaaccttctgtccttctgtccatcactgggggtcacatttgcatcttggtctgttgcctttcccagggtaacctgcctccgttgctatatctctgacaggtgtgtcccctaataaaatcctgtaactttaatcccatgatggcacttggaatgcaaaatcattttcatctgcacaccagtgacctcttacttactccaatttgtaaaatccttttgtttgttcaacttctacctgcattggctccattttgctagtatttgtattatgcttttgagatagtcgatgtttgttgctttaagtcactaaatttgggggtagtttgttatacagcaatggataactaatgaagccctcttacatttctgttattctatagaggttaaatacatccgttttatttcctcccattttgataatattagccatatattgggttcctagtttctctacgcctgtttttttctttattttcgtttcttttctcctttattccttccctttcttctcacttctatctctccctccctctctttcttttctatttccatttgccctccctccctccttctcttccccttccttctttgcttccttcactcctctctccttctttctctcctttcctccatttttttcttttttattatgacatattctgacatataaaataaccctatgtgtttgtactataaggaaacattttctgaatctatatgttaaaagtataaagccatggtatataggatacaagttaacaacaggaagttattaacagagtctgaataagaatgcctgctataggctgggcatggtgactcatgcctgtaatcccagcactttgggaggcctagacgggcggatcacgaggtcaggggatagagaccatcctggctaacacggtgaaaccctgtctttactaaaaatacaaaaaaaaaattagccggtgtggtggcgggcacctgtagccccagctactcaagaggctgaggcgggagaatggcgtgaacccaggaggtggagcttgcagtgaaccgagattgtgccactgcactccagcctgggcgacagagcaagactccgtcaaaaaaaaaatctgctataattctgcagccaaggcagttgctattaactcttaattccttcaactcagtgttttcagaacacatcaacatcacatattacacatttattgtaaaagcttaagttggcacaattactttggaaatcatattatcattatttagtatggttaaaggccatacaacatatcatccaaccatcccactcctaatcatacactctggcggctttctcgcctatgtgcccaggagacatgcacactaatgtttatggcaaaaactggaatcagcctcctatacatcaatagcaaagtagtgaaattgtggtataaccataaaatgtaaaccttcagcagtaaaaatgagtgaatgacagcctcccacacaacagataactcctatacataatgtgcatcatgagaaaagaaatgtagtaggaatttctgtacaggaagcttaaaaaccagtgaaactaatatttggtttgagattatatatacttattgtacaaatatttaaagaaatacaaagtaataataaaaacaagactcaggatggggtctcattctgggggatgtgattgggcagcagcccagggtggctttgcgggttctgtgtcttatgccagtgctgggaacccaggtaactactagattataactccttaaacagtatttttcaaactaaaatatacctgtttcttaaaaaatgaaagaaaaaaatatcaaagttcattgcaaggatccttaacaagaactacttacattggaagaaagccacagagaattgtaaggagccacatgacagagaggctccttacaggatgccatgacaatacccttggctaaagggccatatgatccttggctcacaggcatctctctagattttcaggtatacaagattcaatctgatgtgcaaggtaattccattttgcaaaggatttgatttgttacatattccacacatacaactgaattaaacttttacagaattggaaatgcacatcattgatcaaaatagatgaaacaataaaagagtataaaggaacaaccagtgatggaatagcaaatatgaatggaaaacacaacaggattgctcaaaaaaacttgaaagcacaaaattgcagtgccatttagaatcatagtggtgtccaaatcacttctatcgtatctgattcaataccagaacaaaagatgttaagtttattatagaatgctcaccaaatagccagtttttgaaaaatcttatgcctcagttggagctaaccattttgggctactgcatccaaccaaagctattgacatcttgctaagctagatgtgttaactgaggtatgagattcacatttttgtaaattaaaaccaattaggcaaattttttaaagtgaaatcaagtttatgagagaagtaaggaaacaaaagaatggctactcaatagacacaacagcccttttttttaagtgtaggcaaatgttttttgaagatgatatttcaataagaaaattggcacttggggcatacttcaactaaatgtgagacaccttagttgaaacaaagacttattttcaagtcattatttttacggcacagaagtctttggaatatttgctctagttactctgggttctcaactgttgactcattgaagagaatattgttattaaaggtatttgcaagaaaaactcagacatactattgtatcctctttctctgtctcaaacagttttcgccacaacacccaaggctctgtgatgtctcaaacttttaatcattaatttaaaaagagaagcttatcacagaattagaagaaactattttaaaattcatatggaaccaaaaaagagctcatatagcccggacaatcctacacaaaaagaacaaagcaggcggcctcagactacctgatttcaaactatactacaggctacagtaaccaaaacagcatggtaatagactaatggaagagagtagagaactcagaaataaaaccgcatatctaaaaccatctgatcttcaacaaacctgatgaaaacaagcaacagggaaatgattccatatttaataaatgatgttgggaaaacgggctagccatttgcagaaaactgaaactggaccccttccttacatcttacacaaaaattaactctagatggattaaagacctaaatgtaaaacccaaaactataaaaacccaagaagaaaatctaggcaataccatttgcctgggcatgggcaaagattttatgatgaaatcgccaaaagcatctgccacaaaagcaaaaactgacaaatgggatctaattaaactaaagagcttctgcacaggaaaagacactgtgatcagagtgaacagacaacctacagaatgaaagaaaatttttgtaatctatccatctgacaaagatctaatatccacaatctacaaggaaattaagcaaatttacaagaaaataacaaacaaccccattaaaaagtgggcaaatgacatgaacagacacttctcaaaagaagacatacatgtggccaacaaacatatgaaaaaaagctcatcatcactggtcattagagaaatgcaaatcaaaaccacaatgagataccatctcatgccagtcagaatggtgattattaaaaagtcaagaaacaacagatactggcaaggttgcagggaaataggaatgctttaactgttggtgggaatgtaaattagttcaaccattgtggaagacaatatgacgattcctcaaagatctagaactagaaataccatttgacccagcaatcccattactgggtatatacccaaagaaatataaatcattctattataaagttacatccatgtgtatgttcattgcagcaccactcacaatagcaaagacatggaatcaacctaaatgcgcatcaacaatagactggataaagaaaacatatgacatgtacaccatggaatactatgcagccttaaaaaggaaggagatcatgttttgcagggacatggaaaaagctggaagccattatcctcaacaaactaatgcagaaacagaaaaacaaacactgcatgttctcactgataattgggagctgagcaatgagaatccatgggcactgggaggggaacactgtgtccttttggggggggggcagaggtggggtgcgcattaggaaaaatagctcattcatgctaggcttaatacctaggtgctgggttgataagtgtagcaaaacaccatggcacacgtttacctatgtaacaaatctgcacatcctgcatatgtaccctgaaacttaaaataaaaattaaaaagaagcttaaagcattaaagaaaaataatcacatgaaagaagcatttgatttacaaaatcctgaaataataattttaattttgctttcaacatgtatgcaaatcccttgatactcctcccttccaatggtgcagcttaattccttccctgtgagttcggcttggacttaatgatgcacttctgatatggcctcaccctgtgtccccacccaaactcatcttgaattgtaatccccacgtgctaggggaaagacatggtgggaagtgattagatcatggggatggttccctcatgctgttctcatgatagtgagtgagttctatgagatctgatggttttgcaagagtcttccctgccacccccgcccccgacaaccttgcatttctctctcccaccaccatgtgaagaatgacatgcttccttccccttctgccatgattgtaaatttcctgaggccacctcttcagtcatgcagaactgtgagtcaattaaacctctttcctttataaattacccagtctcaggtatttctttatagcagtgtgagaacagacaaatacaacttctaactgatagagtagtgctgatataacagtttttgactctgggtgtagaacataaaactcactgcagcttctctctctctgtctctgggatcatgagctctgggggaagccaactgctgtgccataagcagccctgcaggaaggtccatgtggctaaaaactgaggcctcctgggaccggacaacaaggaaccatgtgagtgagccatgtttcttgtaaatcccaagccctagtgaagctctcagatgatgcagccctggactggactgtaaccttgtgagaggctctgagccagaagcactcagggaaaccttgctcctggattcctgaccattggaaactgcggtagatgatgtttgttgttttgcgctgctaagttttatgtaatttgttatgcaatagtaaataactaatacattttcataagagaggatgatttattgcacttcaattttcatttgctctaaatttatgatcatgattattactatttttgagacagcatcttgctctgtcacagaggctagagtgcagtggcatgttcaccattcactgctgtgttgacttcctgtgctcaaatatcctctgacctcagcctcctgagtagctggctgggactacaggcatgaaccaccatgcctggataatactctaatgtttttgtagagatggaggtttcaccatgttgcccaggctgatctcaaactcttggagtcaatggatctgccttcctctgcccgccacagtgctaggattgtaggtgccagccaccacacctggcatgaattaattataagctattaaacctgtcacttgattttaagaggtaaggtgaatctccatggctgaagaggatgtattttattatcattcacaatgatcgctttacttgaacttcaatttccaactgtgtcacaattaaacacaaaaggaaaatccaacccttgctaggctgattctataatagtcccaacaaccacctcctggtcatccaccttcccccaattattcaaccaactctactgtaggtgctgctgtgaagggatttagcagatataatcaaggtcctcaatcagttgacttgaggctgggtttagcctgcttggacactcctaatcaggtgagcccatgaaaggactgggttcttcctgagcatagagattcacagtgtgagagggattcagtgtgaggggtttcctccactgtgggctttgaaattgaaggggctgactagaaaagaatgctgtttggctccaggcattgagcacagccctccctcctctctaccttgacagctagcagggaacaggaaactcagtcttaacgactgtcagaaactgaattctgccgcctctatatatgcttgaaggaggattcaaaatgaaaacacagctttgggaagccctgaatagagaccccgtctacatcatgcctggatttctgcctaaagaactgtaaacagatcagtggatgttgtttgggcaggtgtggtagcacacacctgcaatcctaacatttgaggggcttacacaggaggatcacttacactcaggaatttgagaccagcctgggtaatgcaatgagaccctcatctctacaatttttttttaattagctgggcgtggtggcatttgcctgtagttctagttactctgaagactgagccaggaggatcctttgagcccaggatttcaaggctgcagtgagccatgactgtgtgactgcacttcaaaatggatgagagaaagagaccatttctctaaaaataaatgaattaattaaataaatgggtattgtttaaagccaatatttgtgataatttgttatgcagtcataaaattcgtacagtctcaacagacaaatggaatgaatttatgaattgatatgcacactagttacataaaataaaaactttctcaatcttttccagtattgtttattttataattttctgtgatgaaattaaattttaatacactcatatttcatttattcagtcaacaaaaattaatttggggaataggaacagctccagtctacagctcccagggtgagcaatgcagaagacgaatgatttctgcatttccaactgaggtaccaggttcatctcactggggactgtcagacagtgggtgcaggacagtgggtgcagtgcaccaagtgtgagccaaagcagggcgaggccacgcctcacccaggaagcgcaaggggtcagggaattccctttcctagccaaggaaaggggtgacagatggcacctggaaaattaggtcactcccaccctaatactgcacttttcctatggtcttagcaaacggcacaccgagagattatatcccatgcctggctcgcagggtcctacacccacagagcctcgctcattgccagcacagcagtctgagatcaaactgcaaggcggcagcaaggctgggggaggggtgcccgccattgctgaggcttgagtaggtaaacaaagcggccaggaagctcgagctgggtggagcccacacagctcaaggaggcctgcctgcctctgtagactccacctctgggggcagggcatagccaaacaaaaggcagcagaaacctctgcagacttaaatgtccctgtctgacagctttgaagacagtagtggttctcccgcatgcagcttgagatctgagaacagacagactgcctcctcaagtgggtccctgactcccaagtagcctgactgggaggcaccccccagtaggggcagactgacacgtcacacggccgagtactcctctgagacaaaatctccagaggaaagatcaggcagcaacatttgctgttcaccaatatgcattgttctgcagcctccgctgctgatacccaggcaaacagggtctgtagtggacctccagcaaactccaacagacctgcagctgagggtcctgactgtcagaaggaaaactaacaaacagaaaggacatccacaccaaaaccccatctgtacgtcaccatcatcaaagaccaaaggtagataaatccacaaagacggggaaaaaacagagcagaaaaactgaaaattctaaaaatcagagtgcctctcctcctccaaaggaatgcagctactcactagcaatggaacaaagctggaaggagaatgactctgatgagttgagagaagaaggcttcagacgatcaaacttctccgagctaaaggaggaagttcgaacccatgacaaagaagttaaaaaccttgaaaaaagatgagatgaatggctaactagaataaccaatgcagagaagtccttaaaggacctgatggagctgaaaactacggcacgagaactaagtgatgaatgcacaagcttcagtagctgattcgatcaactggaagaaaggttatcagtgatggaagatcaaatgaatgaaatgaagtgagaagagaagtttagagaaaaaagaataaaaagaaatgaacaaagcctccaagaaatatgggactatgtgaaaagaccaaatctgcatctgattggtgtacctgcaagtgacggagagaatggaaccaagttggaaaacactctgcaggatattatccaggagaacttccccaatctagcaaggcaggccaacattcaaattcaggaaatagagagaacacaacaaagatactcctcaagaagagcaactccaagacacataattgtcagattcaccaaagttgaaattaaggaaaaaatgttaaggaaagacagagagaaaggtcgggctacccacaaagggaaacccatcagactaacagctgatctctcggcagaaactctacaaggcagaagagagtaggggccaatattcaactttcttaaagaaaagaattttcagcccagaatttcaaatccagccaaactaagctttgtaagtgaaggagaaataaaatccttgacagacaagcaaatcctgagagattttgtcaccaccaggcctgccttacaagagatcctgaaggaagcactaaacatggaaaggaacaactggtaccagccactgcaaaaacatgccaaatagtaaagaccattgaggctaggaagaaactgcatcaactaatgagcaaaataaccagctaacatcataatgacaggatcaaattcacacataacaatattaaccttaaatgtaaatgggctaaatgctccaattaaaagacacagactggcaaattggataaagagtcaagacccatcagtgtgctgtattcaggaaacccatctcacgtgcagagacacacataggctcaaaataaagggatggaggaagatctaccaagcaaatggaaaacaaaaaaaggcaggggttgcaatcctactctctgataaaacagactttaaaccaacaaagatcaaaagagacaaagaaggccaatacataatggtaaagggatcaattcaatgagaagagctaactatcctaaatatatatgcacccaatacaggagcacccagattcataaagcaagtccgtagagacatataaagagacttagactcccacacaatagtaatgggaaactttaacaccccactgtcaacatcggacagatcaatgagacagaaagttaacaaagatatccaggaattgaactcagctctgcaccaagcagacctaatagacatctacagaactctccaccccaaatcaacagaatatacattcttctcagcaccacaccgcacttattccaaaactgaccacatagttggaagtaaagcactcctcagcaaatgtaaaagaacagaaattataacaaactgtctctcagaccacagtgcaatcaaactagaactcaggattaagaaactcactcaaaactgctcaaccacatggaaactgaacaacctgctcctgaatgactactgggtacataatgaaaggaaggcagaaataaagaggttctttgaaaccaacgagaacaaagacacaacataccagaatctctgggatgcattcaaagcagtgtgtaaagggaaatttatagcactaaatgcccacaacagaaagtaggaaagatctaaaatcgacaccctaacatcacaattaaaagaactagagaagcaagagcaatcacattcaaaagctagcagaaggcaagaaataaccaagatcagggcagaactgaaggagatagagacacaaaaaacccttcaaaaaatcaatgaatccaggagctgattttttgaaaagaccaacaaaattgatagaccgctagcaagactaataaagagagaagaatcaaatagatgcaataaaaatgataaaggggatatcaccaccaatcccacagaaatacaaactaccatcagagaatactataaacacctctatgcaaataaactagaaaatctagaagaaatggataaattcctcgacgcatacaccctcccaagactaaaccaggaagaagttgaatctctgaatataccaataacaggctctgaaattgaggcaataattaatagcttaccaaccaaaaatagtccaggaccagatggattcacagccgaattctaccagaggtacaaggaggagctggtaccattccttctgaaactattctaatcaatagaaaaagagagaatcctccctaactcattttatgaggccagcatcatcctgatagcaaagccgggcagagacacaacaaaaaaagagaattttcgaccaatatccctgatgaacatagatgcaaaaatcctcaataaaatactggcaaaccgaatccagcagcacatcaaaaagcttatccaccatgatcaagtgggcttcatccctgggatgcaaggctggttcaacatacgaaaatcaataaacataatccagcatttaaagagaaccaacgacaaaaaccacatgattatctcaatagatgcaaaaaaggcctttgacaaaattcaacaaccttcatgctaaaaactctcaataaattaagtattgatgggacgtatctcaaaataataagagctatctatgacaaacccacagccaatatcatactgaatgggcaaaaactggaagcattccctttgaaaactggcacaagacagggatgccctctctcatcactcctattcaacatagtgttggaagttctggccagggcaattaggcaggagaaggaaataaagggtattcaattaggaaaagaggaagtaaaattgtccctgtttgcagatgacacgactgtatgtctagaaaaccccatcatctcagcccaaaatctccttaagctgataagcaacttcagcaaagtctcaggatacaaaatcaatgtgcaaaaatcacaagcattcttacacaccaataacagacagacagccaaatcatgagtgaactcccattcaaaattgctacaaagagaataaaatacctaggaatccaacttacaagggatgtgaaggacctcttcaaggagaactacaaacctgctcaatgaaataaaagaggatataaacaaatggaagaacattccacgttcatggataggaagaatccatatcatgaaaatggccacactgcccaaggtaatttatagattcaatgccatccccatcaagctaccaatgactttcttcacagaattggaaaaaactactttaaagttcatatggaaccaaaaaagagaccacattgccaagagaatcctaagccaaaagaacaaagctggaggcatgacgctacctgacttcaaactatactacaaggctgcagtaaccaaaacagtatggtactggtaccaaaacagagatacagaccaatggaacagaacagaggcctcagaagtaacaccacacatctacaatcatctgatctttgacaaacctgacagaaacaagcaatagggaaaggtgctgggaaacttaataaatggtgctgggaaaactggctagccacatgtagaaagctgaaactggatcccttccttacaacttacacagaaattaattccagatggattaaagacttcaatgttagacctaaaaccataaaacccaaaagaaaacctaggcaataccacttaggaaatcagcatgggcaaggatttcgtgactaaaacaccaaaagcaatggcaacaaaagccaaattagacaaatgggatctaattaaactaaaaagcttctgcacagcaaaagaaactaccatcagagtgaacaggcaacctacagaatgggagaaaatttttgcagtctacccatcaaacaaccccataaaaagtgggcaaaggatatgaacaggcacttctcaaaagaagacatttatgcagccaacagacacatgaaaaaatgctcatcatcactggccatcagagaaatgcaaatcaaaaccacaatgagataccatctcacaccagttagaatggcgatcattaaaaagtcaggaaacaacaggtgctggagaggatgtggagaaacaggaacacttttacactgttggtgggactgtaaactagttcaaccattgtggaagacagtgtggcaattcctgaaggatctagaactagaaataccatttgacccagccatcccattactgggtatatgcccaacggattataaatcacgctactataaagacacatgcacatgtatgtttattgtggcactattcacaatagcaaagaattggaaccaacccaaatgtccatcaatgatagactagattaagaaaatgtggcacatatacaccatggaatactatgcagccataaaaaggatgagttcatgtcctttgtagtgacatggatgaagcaggaaaccatcattctgagcaaactatcgcgaagacagaaaatcaaacagcgcatgttctcactcataggtgaattgaacaatgagaacacttggacacagggtggggaacatcacacactggggcctgtcgtcaggtggcgggatgggggaaggatagcattaggagaaatacctaatgtaaatgactagttaaagagggcagcaaaccaacagggcacatgcatacatatgtgacaaacctgcacgttatgcacatgtaccatagaacttaaagtataattttaaaaaaatgtaagagaaaagaataccaaagttaattgcaaggatccttaataagaactacttacattggaagcaaaccacagagaattgtaaggagtcatgtgacagagaggaccaggatgccatgaaaatggacttggctaaaaataggtcatttaacccttggctgactggcatctctctagattttcagttatacaatgttcaatctgctgtgcaaggtaattccatcttgcaaaggatttgatgttacattctaccacacatacaactgaattaaacttttacggaattggaaatgcaaataattgatcaaaataaatcaaacaagaaaagaataggaaggaataaccagtgatggaatatcaaatatgaatggaaaacagaataggactgataaaaagaaaaaaagcttcagaagcacataatagccgtgttatttagaatcatagtggtgtgcaaatgacttctatcacatctcattcaataccagagcaaaagatgttaagtttattatgtaatgcccaccaaatagctagcttttgaaaaaaacttgtttctcaatttgagctaaccatttcaggctactgcatcaaaccaaagttattggcatcatgctaagctagatgtgttgactgaagtatgagattcacacttttgtaaatgaaaagcaatttgattaggcaatgttttcctaagtgaaagcaagttattagagaagtaaagaaacaaaagaatggctactccatatagcggagtttttgtttttttttttaagtgtaggcaaatgtttagtgaagatgatatttcaataagaaaattggtgcttgggacgtgcttccactaaatttgagatatcttagacaaaacaaagtcttattttcaagacattatttttatcagactgaagtcttggaactatttgatctagttactctatgttctcaactgtgttaactaattgaaaacaacattgttattaaaggtattcacaagaaaaattcagagttactgttgcatatcctttctctgtttcaaactgttttctcctaagcacccaaggctctgtgatgtctgaaacagttaatcattaattttaaaagataagcttatcgtggaattagaaaaaaaaactattttaaaattcatatggatccaataagagctcatatagcaaagagaatactaagcaaaaagaacaaagctggaggcagcacactaccccacttaaaagtatactgtgaggctacagtaaacaaaacagcatgatactggtacaaaaacaggcacatagaccaatggaacagaatagagaattcacaaaaaaagtccgcacatctacaaccatttgatcttcaacaaacctgacaaaaacaagcaacggggaaaggattccctatttaataaatggtgatgggagaactggctagccatatgcagaaaattgaaactagaccccttccttacaccttacacaaaaattaactcaagatagattaaagacttaaatgtaaaacacaaaattataaaaaccctgaaagaaaatctaggcaataccattcaggacacaggcatgggcaaagattttatgatgaaatcgccaagagcatctgccacaaaagcaaaaattggcatatgggatctaattaaacaaaagagcatctgcacagaaaaagaaactatcagagtgaacagacaccctacagaatgggagaaaatttttgcaatctatctatcttacaaaggtctaatattcagaatctataaagaacttaagcaaatttacatgaaaaaaacttcattaaaaagtgaacaaaggacatgaagagacatttcacaaaataagatgtacatgtggccaaaaaaacatgaaaaaaagctcaacatcactgattacagaaatgcaaatcaaaaccacaaatgagataccatctaatgccagtcagaatggcaattatttaaaactacataaacaccagatgctggcgaggttgtggagaaataggaaggcttttacactgttgctggaaatgtaaattggttgaaccattgtggaagacagtttggtgattcctcaaagatttagaaccagaaataccatttgacccagcaatcccattacagggtatacatccaaaggaaaataaatcactctattataaagatacatgcatgtgtatgcttattgcagcactatccacaatagcaaagacatggaatcagcccaaatgcccatcaatgatgtactgcattaagaaaatatggtacatatacaccatggaatattatgcagccacaaaaaggaatgagattcagtcttttgcagggatatggatgaagctggaagccatcctcagcaaactaacacaggaacagaaagccaaacaccacatgttctcacttataattgggagatgagcaatgagaacacatggacacaaggagaggaacatcacacactggtgcctgctgggggagggcagtggtgggaggagtattaggaaaaaatagctaatgcatgccagggttaatacataggtgatggtttgataggtgcagcaaaccaccatggcacacatttacctatgtaacaaacctgcgcatcctgcacacataacctggaacttaaaattaaattaaattaaaagacaagctaaaagggttaacgaaaaataattagataaaaaaattttgattttcaaaatcctgaaacaagagttttaaatttgcttttaatatatattcaaatcctttaatactgttcccttccagagatgctgcttaatttcctctcttgagtgtggctgggacttaatgatgcatttctgatatggtctggctctgagttcccaccaaattctcatcttgaattgtcatgcaaattgtaatccctatgtatcgggggagggacctcctgggaggtgattggatcacgggtatggtacccccatgctgctcttatgatgctgagggaattctcatgagatctgatggttttatgaggtatttttccccacttcgatctgcaattctctctcctgccaccatgtgaagaaggacgtgtttgcctccacttctgccatgattgtaagtttcatggggcagccttctcagcaatgcagaactatgagtcaattaaacctctttcctttataaattacccagtctcaggtatttctttatagcaatgtgagaacggactaatacaacttctaactggtaatgctgacataagagtttgtgactctgggtgtagaacataaaactcactgcagcctcccccttctctctcaatgtctctggaatcatgagctctgggggaagccacctgctgtgccataagcagccctgaaggaaggtccatgtggctgagaactggggccttctgggaacagaaaacaaggaactagggcttttccaacagccatgtgacccatccatgtttcatgtgaatcctcagtcccagtgaagcactcagatgatgcaggcctaggctgacaactggactgcaaccttgtgagaggccctgagcaagaagcactcagggaaacctctcctggattcctgaccattggaacctgcgggagatgatgaatatttgccattttgagctgctaagttttacataatttgttatgcaatagtaaataactaacacattttcacaaaagaggatgtagtattacacattaatttgcatttgctctaaatttatcattattattaatattattgttattgagacagggtctcgctctgtcgcccaggctggagtgcagtggcatgatcaccatgcactgcagtgtcgacttcctgggctcaagggaccctcttatctcagcgtcctgagtaactgggactacaggcatgaagcaccacgcctggctaattttctaaatttttttgtagagatgggggtttctccatgttgcccaggctgatcttcaacatctggagtcaacaaatctgccttcctctgccttccacggtgctagaatcacaggtgtgagccaccacacctggcctaaattaattataagacattacacatgtaacttagttttaaaaggtaaggagaatgtccatggctgaagaggatgcattttattaccattcacaatgatcactttacttgaacttcaatttccaactgtgtccaaattaaacacaaaaggaagatccaacccttgctgggctgattctttgatggcccccaacagccacctcccggtcattcactttcccccagttattcaagcaactctagtgtagatgctgctgtgaagggatttagcagatataactaagggcctcaattagttgactttaggctgggtttatcctgctttgactgtcctaataaggtgagtccttgaaaggtctgtgttctttctgagcatagagatttgcagtgtgagagggattcagcatgaggggtttcctctaccgtgggctttgaaaatgaagaggctgtgtaggaaagaacactgttaggcaccaggaattgagcacaaccctgcctattctctgtattgacagccagcaaggaacagaaacctcagtcttacaactgccagaaactgcattctgccacctctgtataagcctgaaggaggattcaaaatgaaaacacagcttttggaagcccagaacagggattctatccacatcttgcccagatttctgaccaaggaagtataagcagataaatgggtgttgttttgccagtcgtggtagtgcacgaatgaattgatgaattgatatgcacactaattacataaaataaaatatttcttaactttttcagtattttacattttataattttctgtgatgcaatttaatagactcatatttcattcattcagtcaagaaaaattaatttaatccctacaatgaaccaggtgtgccctcatatgcttacgtgcctgacattccagaagcttcacaagaccaaggtggagccagtggaatgttttaggtggagaaatgacacactctgactcacaggagcaggaccactgtgcagagaacagtcacgtagcaggtaatgggacagtgctagtgtcacaaataaggagtgacaaggtggtggggactaaggggagaggagggcctgaggcatgagaggaatggagggaagggctggagatgcaggaggtgaggaaatggagcagagggaaagaattcgaaagcagcagaactcaggtttaaacacattgttttatatattttaatacatcaatctacagagccttgcagggtgatctttgcagttggcctttaataccttatgtgggtctgcctaaaaactaatttttttatgttaatcaggtttaaaaaatactaagtgttcatataaaatatacacaacacttagaagtggatacttcctaaaaacaggcagtgcatgagcactggtgaggggcattgtgactgcattgagtgcttgccactgtgagatgaataaagtccgtactggctcctggttacaacatatagtaacacagtggctaccttgtattaggagatgtcctggactcacacagaaactcagggctatggaatgaaggtaaatttaaaatactacaagcgggagtcacagatacattgtctgggaaagtgaaacttaggagctttgtgattcctgttgtaatgcttttagacacatttatatgtcaagggaccaaagtcacatttttggccgattagattcctgatcattaggagttaccaagattctgctacccactgtagttaataaacaaaaagcaaactggtctctattctatctcatgcactcaggcacaacttttccagatttaaaaaacaaacaaacaacaacaacaaaaaaccctgtctctacacctccattcccagggcaagctcactctctggcaacaagctccctggggtgatttttcttctagaagagtccacggggacaggtaaggagtaggaggcagggagtccagttctgggacggggattccgtgatgcaaagtgaagagagagggacggggcccattccgagggtttctccctggtttctcagacagctcctgggccaagactcagggaaacattgagacagagcgcttggcacagaagtagcggggtcagggcgaagtcccagggcctcaggcgtggctctcaggatctcaggccccaaaggcggtgtatggattggggaggcccagcgctgggcattccccatctttgcagggtttctcttctccctctcccaacctgtgtcgggtccttcttcctgggtactcaccgggctgccccagttctcactcccattgagtgtcgggtttctagagaagccaatcaatgtagccgcggtcccggttctaaagttcccacgcacccaccgggactccgattcttcccagtcgccgaggatggtgtcatggcgccccgaaccctgcttctgctgctctcgggggccctggtcctgacccagacctgggcaggtgagtgcggggtcgggagggaaacggcgtctgtggggagtagctaggggcctgcccggcgggggcgcaggaacccggttgcggtgccgggaggagggtcgggagggtctcagccccctccttgctcccaggcttccactccttgaggtatttccacaccaccatgtcccggcccggccgcgcggatccccgcttcctctccgtgggcgacgtggacgacacgcagtgcgtgcggctcgacagcgacgccacgagtcccaggatggagccgcgggcgccgtggatggagcaggaggggccggaatattgggaagaggagacagggaccgccaaggccaaagcacagttttaccgagtgaacctgcggaccctgagcggctactacaaccagagtgaggcctgtgagtgacaccggccgggggcgcaggtcactacccctccacatcccccacggaccgcccgggtctccccgagtctctgggtccgagatccacgccgaggcagcgggacctggagacccttgacccgggagaggcccaggagccgttacccggtttcattttcagccaaaatccccgcaggttggtcctggcgagggcggggctcggtgggcggggctggccgcgggggcggggccagggtctcacacccatctagaggatgtctgtctgcgacgtggggtcggacgggcgcctactccgcgggtatcaccagcttgcttacgatggcaaggattacatcgtcctgaacgaggacctgtgctccttgacagccgcagacacggcggctcagatcacccagctcaagtgggaggcggcccggggggcggaggttcatcctcacagggataggcacctattagatgtggtgtggttttcctctctactcttagaccctcagccagtatcactattggcattcctgagccactggctcagaatttcagtacattatctgcccgcgggacacacctcagaggaaaggggatgaagcgtggtccatgaccatggcaccccctggtcttatcaccacctgcacctcccaggggctgccagccacacagagtcatggacaggtctctacagacacaacttagtgccagcttggatgaaaccctctgaggaatgggtgccatctttcaggatgtggtgcatgtattgaatcaaagatgtctctatagtgctgtgtttacagaaggaagaatacgtgggtccaaaaaccaagaagtagaagcaggtgtggctccatatctaaacccttatattcaccttcagggtgattttgcacttctcatctccaatatctgggctctgtaggggaggaggtcctggtttcccaaagggggcaccctggcaaggagacatttaaatgagagtccatggaaatacacattatggctgcccccagggatgtttgaatagtatgtgtccagatacaagcaggtgagaagaggaggaggcagggctgctatcacacaaggagggcaggagatgtgtgtgtggaaataagagatccacttggagaccttatggttccccttgtcctgttgtaagtgtgagcagaatcatccagcaacccagcctgagagggtttcatattcaagagcccagaaccctcaggaaggaaggattgagtgatactcacaggtaatgtcccaaggctgtgctcctgtgctctgacatcctcagcaggattggtgcaaagccctgcttcccatgggctgttcccagccagtgactggtcacagcaggcattaaggcaagccattcctgggagacacgggactcctctgatggctaactgtagctggaagactcctccacggccttgctcaactctccttagattgcctgtgctctaggatgcgtcaaacaaactttctctccttctgtccagcacttggggtcacacttgcatcgtggtctgccgccttttctcagggatttctggctcacttcccatattcccttacgggtgtgtccccttataagatgtcgcagactttaagctcatcttggcatctgctccttgaaggacttggactaaaaattatttccatctgcatatcaataactcttattccaacctgtaaaatccttctctttatccaacttctgccacccccacagaatctattttacttgtgtgtgtagtatctctttgagttaacagatatttgttctattaagctactaaattttgaggtagtttgtgacacagcacttgataactattaaggctttcttaagtttccattattccatggatattatctacatatcttttaatcccttgcattttaataacattagctatacttgctgtttccaactctttcctcctatttttgaacattttaaattttgtctttctctgtccttccttccttctttcctcctttcctccctcagagctttctccctccctccatttttttcataaactccaagtgtttaggccaaaaggaagcattatttgaactttatgctaaaagtataatgccgtaatttataatataaaagtaaagaaaaggaagttgttaatggaatatgaaaaaatgcctagggtgattctatagccaagacagtaccttttaacatttaatttctgcctccaactgaatgttttcagaacacatgagcaacacaagctctttcccattcttggtacaagcacttgagaaatcaaattagccttatctagtatgattaatgtccatacatcatataatcccaccatctgcctcctgatcataccccctggggacattcttggctatgtgtccaggagacatgtacaccaatgtttatggcaaaaactggaaacaatcacatatacatcaatgggaattaacaaaatagtcgtataataataaaaagtaaaacttcagcagcaacagtgaatgaacagcaccctcccacatcagagataactctcctacacataacatgcatcagcatcacagaagaatgcacattgtgtgagttctctgtacggggaagttaaaaaaagcaggtcaaactgtgatttggatatatatatatatacttattgtaaaaatctttagagacaatgaaaaggaatagtaaatacaagactcaagatagaagttccttttggggaatagaattggacaacagccgagggtggcttcataggttttgttttttatgccaggaggggatgtccaggtagttaagttacttgatcataaatctttctttctttctttccttccttccttccttccttccttccttccttccttccttccttccttccttctttccttcttttctttctttctttctttctctttctttctttctttctttctttctttctttctttctttctttctttctttctttctttctttctttctttctttctttctttctttctttctttctttctttctttctttctttctttctttctttctttctttctttctttctttctttctttctttctttctttctttctttctttctttcttttcgagatggagtctccctcttgttgcccaggctggagtgcagtggcatgatctcagttcactgcaacctccgcctcccaggttcaagcaattctcctacctcagcctcctgagtagctggaattataggcatccaccacgacacccaggtaatttttgtatttttagtagagacggggtttcaccatattgtccaggttggtctcaaactcctgacctcaggtgatccgccaacttcggccttccaaagtgctgggattacagacatgagccaccattcccggcccacaaatctttaaagtgtcatttttcaaaatgcaccttgtgtgccattcctgactgattatttggaaatgaaagagaaaagaaaataccaaagttcatctcaaggatccttagcaataactacacacgttaaaacaaagccacagccaattgtaaagagtcatgtgacagagaggaccaggatctcatgaaaaatagccttggctagaaagaggtcatttgaccctgggctaattggcaactctctacattgtctggcatacagtgttcaatctgatgtgcaaggcaattgtatcttgcaaagaatttgagaatgtgatatgttgctcacattttaccacacatacaagtggattaaacttttacacagtaaaaaaaaaaagcattgttgagcaaaataaattaaatgaaaagacataaaggaataactagtgatgaaatagcaataagaatggaaaacatgaaagagatgcttgtacagcaatgatagcagcacaaaagaacagtgtttttcagaatcatacaggagtccaaatcacttctaccacatctaattaaaaaacacagtgaaagatgttaaactttcataggatgcccactgaatagccagttattgaaaaatcttgttcctagattggagtaaacaatttctgcctaccctagccaaacaaattattgtcatgatgctaagctagtgtatagacagaggtgtgagattcacatttttctaactgcaaagcaccctgattaggcaaatatttttgtagatgcttgagtaagaaaattggcattttgggcattcttaaaccgaattagaaacttctgaagagaaacaaacgtagttatgattgtaaaggcattattgtatggcaccaaagtcttgggacactttaatttagctactgtattttctcaactctgttgcaacttatcaaagagaatattaatattaaaggcatttacaaaaaaaatctgagatattgttgtatcttctttctctgtctcaaatatttaatcaactttacagaagagaattttaaagtattaaaaaaagtcagatacaagaagtatttgatttacaaaaccctgaaacaataatgttaattttgcttttaacatgtttataaattctttgatactcctcctttccagaagtgcagcttcattccctccctgttcgtgtggcctggacttaatgactcacttctaactgatagagtaatgctgacataatagtttgtgattctgggtgtagaacataagactcactgaagtttctactttggttctttctttctctggaatcatgagccctgggggaagctggctgttgtgtcataaggaggcctgtggtccatgtgactaggaagtgagtcctcctgggaccagacaataagaagctaaagcctcttccaaaagccatgtgagagattcttgtgtcttgtgaatccccggccccatttgagccctcagatgattcagccctggaagacaactagactgcaacgttgtgagaggccctgagccagaagcattcagagaaacttctcctggattcctgaccatggataactgtgggagatgataaatatttgttgatttgagctgctaagttgtaggtgacttgttatgcagcagtagataactaatacagcttcacaagagaggatgaatcactgaactttttcatttgctctaaattcattataagatattaaacatgtcatttgcttttaatatttaataaaaatttccatggctatataagatatattttattatcattaacaatgatctattttttgatcttcaacttgtatgttctatttaaacatgaaaggaagatccaggctagctaggctgattctatgatgacaccccaataaccacccttggtttctcaggttaccccagttactcagttgacactaaagcaggtgctgctgtgaagaggttttgcagatatatttaaagtccccagtcagttgactttaagatgaggattatcctgcttagacggtcctaatcaggtaagctctgaaaaggactgggttcttcctgagaatagagactcacagtgtgagagggattcagcgtgaggggcttcctccactttgggctttgaaaatggagggatcatggggaaagaacactggtggccaataggaattagaagccctccccactgtctactctgatagcccgaaggaaacagggaccttaatcctacaattgccagaaaccgaattctgccaacaaactctacataagcttgggggagaaccccaatcttaagatgaggatacagctttgcgaaactctgaacaaagagtctatcacattaggcctggatttctgatgaaggaaatgtagacaaataaatgggtgctgttttcagccactaagtttgtggtaattggttatgtactgccaggaaataaataaacagattcaaaggataagtatatgacattttctccaccggaatgaattcatgaactgatatgcatagtagttgcataaaaccaaatatttcctaacttgctttgcattttccatttcatgatttttgtgtgatacaattttgaacacaattatatttcattcattcattcaacaaaaattaacttagtgcctactatgtggcagatatacttttatattctgtagatacaactttgatcaaagcaacccaaagcccctgtgcttgtgccttccattctagaggcttcttgagagtaagatggagccattagaggcttttaagtgaagaaatgacacaatctgactcacattagcaggattgctgacctttgtggggagaacagtcatgggcagcaggcgagggacagagctagggacacaattcagtagtgacagagtagtagagactaaggggagaggagggcctgaaggatgacagggacagagagaagggctggagaagcaggaggtgaggtaaaggaacagagagaaagaattctaaagcaatggaattctcagacttaaatacagtgttttatagatttttaatgcatttatccgcaaagcctggcacagtgttacttgcaccttggtctttaatgcattctgtggggctgtctaaaagctaattgcctctctaagataaaaaggttaaaaaaggccgggcgcggtggctcacgcctgtaatcccagcactttgggaggccgaggcgcgtggatcacaaggtcaggagatcgagaccatcctagctaacatggtgaaaccccgtctctaataaaaaattacaaaaaaattagccgggcgtggtggcggtcgcctgtagtcccagctacttgggaggctgaggcaggagaacggcgtgaacccgggaggcggtgcttgcagtgagcgagattgcaccactgcactccagcctgggcgacagagcgagactccgtctcaaaaaaaaaaaaaaaggttaaaaaagaataccaaatgtctcaataaaatatacacatagcttagatgtgaataattcataataataggcaagtgcatgggccggccattatagctcatgcctgtaataccagcattttgggaggctgaggcgggaggattgcttgagcccaggagttcaagaccagccagagcaatttagggagacctcatctctacaaatattatttttagaaaaattagccaggagtggtggcacaagcctgtggtgccagctacttgggaggctgagggaggagcattgatcacatgagccaaggaggtcgaggcttcagtgagtcatgagcgtgccactgcactttagccagggtaacagagtgacgccctgtctgtaaataaataaaaaataaaaaaattaataataaagggagtgcatgagcactggcgaagggcactttggctgcattaagcacttgcaattctgaggtaattaaattctgtacaggctcctggttgcaatatacggtaatacattgtgctttgtattgagatgtcctggactcgcacacacaaactcagagctatgaaataaagatactgtaaaaatacaacagaccagagtcacagatacacagtctgggaaagtaaaacttcactttgtgagtctaattgcaatgcgtttagacatatttatatataatggggccaaaaatcatctcttttacaaattagattcgtgaccattcaggggctaccaagattgtgctacccactgtagcacaatcggagacccacgccgaggctgcgggactcgtggagaccctcgacacaagaaccccaggtgcctatacccgattccattttcagttcaggcccaaatccccgggggattgatcggggcagaggaggagctcagtggctgaggctgaccgcgggcttggggacagggtctcccacctccagtggatacacagctgcgacctggacccggaccggagcctcttcgcgcggggatgaacataccctacgatggcgccagttacctcgtcctaaaccaggaactgctctcttggaccgcagcggaaaaggcggctcagatgttttggaggaggaacatgcagagctgctcaaaacctacctgccgggaaggtgggcggagtggctcagcaaaggccttaagaatgagaaggagaggctgcaatgcgcaggtaccagaggccacgggtcgcctccctgatctcctgcagatatccctgagccaccttccaaaagaaggggaggaaaatgggaccaacgctaaaatatccctctccctcttgtcctgaggcagaagagtcctcctgggtttctaaatcctataccagagagtgactgagggcccgccctgcactctgggacaattaacggatgaagtctctgcgggaaaggaggggaagacaatccctggaatactgatacgcggtaccctttgaccccccagcagccttgggcaccaggaattttcctctcaggccttgttctctgcctcatactcaatgtgtgtgggggtctgattccagctcttctgagtccctcggcctccactcaggtcaggaccagaaatctctgtttccgcctcagacactagaactttccaaggaataagagattatcccaggtgcctgtgtccagaatgttgtctgggttctgtgctcccttccccaccccagatgtcccatccattctcaggatggtcacatgggtgctgtgtctcatgaggaatgcaaagtgcctgaattttctacctcttgccctcagatcccctgaaggcacaggtaaccctccaccccatctccaactatgaggccacgctgaggtgctgggccctgggcttctaccctctggagatcacactgacccaggagcgggatggggaggaccaaattcaggatgcagagtttgtggagaccagacttgcagggtacagaaccttccagaagtgggcagctgcagtggtgtcttctggagagaagcagaggtacacatgccatgtgcagcacgaggggttgcctgagcccctcacactaagatggggtaaggagacgaatgaggggtcatgtctcttctcaggcaaagcagaagtccttctggagcctttaagcagggtcagggctgaggcctgggggtcagggcccctcacgttcacctcctttcttagagctgtcttcccagcccatcatccccgttgtgggcatcattgctggcctggttcttctagttgctgtaatcactgtagctgtagtcgctgctgtgatgtggaggaataagatcccaggtaggaaaggggtgagctctgagtttccttcttccattggtggatttcaagccccaggtaggagtaggctcatatcttgcctagttgtgaggcaccatctccacacacatttaccctgttcagaggccctgtctatcaacgcttactcttttgtaaagcacttgtgaaaatgaaggacaaatttatcaccttgattgtggtcatgggaacctgactcccagcagtcacaggtcaggggaaggtccctgctgaggacagacctcaggaggacaattggtccagcctcaacacatcctcttcccttgggttttctgatcctgacctgggtctgtagtcacagttctggaaactcctctaggatctcatgccctgcctcctccctggcctctcacagtttgttttctttccacagatggaaaaggaggcagttatgctcaggcttcatgtaagtgtggtaggggtgggaagagtgatccctgagatccttgggatagtgtagacaggagcccatgggggagctcagccaccccaaaattcctcctttagtcacatcacctgtgggctctgaccagattttgtttttgttccaccccaaacaggaacagtacccagggctctgatgtgtctctcaaggcttgtaaaagtgacaccttagagggcctgaagtgaaagaggagttgggcagaggggacacaactaagctctggagattctttgatttggaatttttcaaggtgtggtgggctgttcagtgtcacaacttactatgactgacctggattagtttatgactatgttttttctaagattgccttgtgagggactgagatgcaagatttgttcatgcctcctctttgtgacattaagagcctctggcttctctttctgccaaagggtctgaatgtgtctatgtctacagtaacaggtaagaaatgggagaccagcccatcctcatgtccaccatgacccctgatattgtttggatctgtgtccccacccaaatctcatgttcaattgtaatccctaattttggaggtggtgtctggtggcaggtgatcggctcatgaggatggatccttcatgaacggtttagaaccatctctttggtgctattcttgtgataattctcataagatctggtgtttaaaaatctgtgtcacctccctgctctctctccctcctgctccaggcatgtaagtaatgtctgcttccccttagccttccagcataatcgaaagttccctgaggccctctcataagatgagcagatgccagaatcatactttctgtatagcctgcagaaccatgacccaatttaaacctcttttctgtttttgttttgtttttgttttttgaaggaaaatttatattattttaattatttttacatacagaaaactcaacagcatacatttcacccaatttagtggcatgttctttaccctttgcctttttgagcttggcaatgcaaaccacatacttgagacccaggacactgtctccccagtgatggcggatctcatcgtatctgtcattgtaattggtcctgagaactcccaccagcttagccaaagcacctttgtcttccgagttaacctgtgtgaaggtgacagtggtgcaggtcttcctatggactagatgtcccagtcttgccttccctttgataatgcagtaagggaccccattttatgacacaggacaggcaagaagacaaccagcttgatgggatctacatcatgtgcaatcaccaccagctgagctttcttgttctccaccaaggtggcgatggtgttaactcctgctcgaaggacaggtggactcttagtggggaatgtcccctttgccagcagctttcttcttggcccgggccaacagcctctgcttcttctcttggtttgtctctggtctgtattgtgggccagcttaagcagcagagtagctgtttggctgtctggtgcctgggtgaactggttaatctcaggaggcactttcagccacttatagaggatggttctctgctgctgcaacctgatatagcagggccatttcacaaagtgggtgaggtctcttttgggctggatatcctgtccagtgccaaaattcttaggccttttctcaaacaagggatttaccactttcttggcctcctgcttcttcacgacagcaggggctggagccaccttcttctccttggccttctttccttttggcatcttggatggtgggaggagaaagaaagaaacctattttctttataaattacccagtctcaggtatttctttataaaagtgtgagaatgaactaattcagaaaatcggtaccaggagttgggtattactataaaaattcttgaaaatgtggaaacagctttggaactgggtaacaggcagaggttggaagagtttggagagttcagaagacaagaaaatgggggaaaatttgcaacttcctagagatttgttaagctgttgtgaccaaaatgctgatagtgatatggacaatagagtccaggctgataaggtctcacatggagatgaggaacttattgggacctagaggaaaggtcacttttgttatgcattggcaaataacttggaggcattgttccccctccctagggatctgtagaactttgaacttgagagtgatgtataagggtatctggtggaagaaatttctaagcagcatagcattccagatttggcctgcctgcttgtaatagcctatgcacatatgtgtgagcaaagacatgacctgaaactggaactgatatttaaaggggaaatttaatatccaggacaattcctagtggagctgcaggaacaggacccctgccaagactactaaatcatagagccactggcaatatgcaagctcagcctggaaaagccataagcattcaatgttcacccatgagagcagctatatggattatgttcaccaaagccacggatatgaggctgaagatggcattgtgagtccattgcttgcaccagccagtgtgctcagggttcaagatatagagtcaaaggagattattttagagctttaagttttaatgtctgccatgatgagtttcaaccttgtgaggacactgcattcatttcttttggtccacttatttcttttggaatggaaatgtataggaaatgtctctaccactgttgtattaatattttagaagtaaataactttttttaattttacaggtgcacagctataagaacttaccttgagtctcagatgagactttggaatttagagttgatgctggatcaacccaacacattttggacaattgggagaagattattgtcttttgcaatgtgagaagaatgtgagctttggctggctagggacaggatgcaatgatataaatatttatccccagatacctcatgttaaaatctgatccccaatgttggacttagggcctaatgggtggcgtttgggtcttgggggccaatcttttatgaacagagagatactgccctctctcgggagtcaatgaattgttgccctattagtttccaaaagagctagttgttaaaagagtctcgcaccttcctactccctctgttcctctcttaccacgtgacttctgcacataccagctcccctttgccttctgccatgagtggaagcagcctgaggccctcgctaaatgctcaaacatttccagacatcagaatcctgagccaaatgaaccttgtttatataaattagtcagtctcagacatttctttatagcaacacaaaacggaataagacaaccctctcatcataggtatgtgtctgtggcagccagcccccattctcaaggtatccaggatcctctcagccaagagtcctttcctcagtattctaaagacactctaatcactcaagagattctaaggtttttaggagaaaccagggacaaaactaaatgtttttgtgataactcatattacccccttttctttgaccacatatttttcatacgaaaaggattataacagtaaagaagcattggcatattatccaagtctcattcggtcattcaaaattaggccagtttatcatcctcttgtatgaatatgtctcccagaatgacatcactcagctttgcagacaccattcaatcttatcaggttccaaaaacaagaatggtctcagggacatacagcttcacccttttaggcatccagtatagttgacctaagagacaacatctcttgctcacaccacttttgaggagataagctaatattgaattttcctcattacataaccctttgatttattcacctaccctcagccactattcctccttctgtccctttatatcagtcttttccagttctagaagtgacattaggtttggctgctgtgctggcctagactgcatgcagcaatagtattctaccatgtcttctcttaatctactcttgatcatagacagtaggttacataggttaggaactagtgcaggctatctgaccaccagtctacgtagctctacttacagttaatcccgactttgccagatgaaatgaaggcacagcgcaatccttgatttgcttgggaattcttacataaaggtataaaaatatagttatggttttttccttagggataattcctgtttctggcagttcgatttgcatccctgttcctggtaccactgcaccctgtgtaaaaaaagaaataagaaatgaagtgtagtcattattccagcatcctccccttaagaagaattgtatgtacagtcataacagcatcaccctgatccatcaggaaaaagagaggaagctacctagtggagtcagtttcgcagctccacccatgttgacagtaagcacattcatgaagatataaaagccagtccttcatgtttatattgcccaacaattatattggcagtttttagacaattagacaaccaatgtttcaactgactatttctttttctttttttttttgagatggagtctcactctgtcgcccaggctggagtgcagtagtatgatctcggctcatgcaacctctgcctcccaggttcaagcaattctactgtctcagcctcccgagtagctggtaatacaggcgcccaccaccacacgcagctaatttttgtattttcagtagagacggggtttcaccatattggccaggatagtctcaaactcctaaactcaggtgatccgcccgcctcggccaccaaaagtgctgggattacaggcatgagccaccgtgcctggtcagccatttcaatattctatcaaagtttcccctgaatagtacatttccctgtgcactgttggctttttaaggctgtaaagtgtgttttcttgtgtaaagaaatgtgactcaacagtccaaattggtgtaatctccatttttctggttcttgtatagcctttgaagcattgacatctacccctggttgatcatagcccaatccagagtcagtgacttccctgtcaagatccattggcagctcctttggggttgctggcattagtctggcttgccagctatgaatgatcaaagcttcccactacagaatctgtcacagagctgcctctgtctgttttcttgaccaaaagtcaaaacagacagtatgagaaatgagataaattaccaaaattgtgaacacaagagagagtatcactaatgaccctttagaagttaaaaaacattataagttaatactctgaaaaacctgaagccaatcagttagaccacttagataaaatggacagatttatacaaagatagaaattgctgaaactgactcaaaaataaatagaaaatctgaagagaactgtacactaagacagtaattttaaaaccttctcacaaagaaatgccaaagcccagatatcttcactggtgaattctatcaaatatttcaaaagctctttcagacaagaagagaggaggcaagactttctagctcatttacagaactgacattaccctaatatcaaagtcagagcaagactgacaagaaaagaataccatagaccagtgtcaccaataaacataaatgaaaacatccttaacaaacattggcagacaatagaaagccacgtaaaaaaggattacattccatgaccaatgggattcatcccaggaatatatggctggattaacaattagaaatcaattaatggaatgcactgtagtaagggaataaaagacataattatctcaaaagatacagaagaaacagttgacaaaaatgttaacaccactcatgttcataagtttcaacaaaataggaatggaggggaccttcctcaccctgataaagggcatctataaaaaacccacaactaaaatcatgcttgctgaagaaagactgaatgcttttctcctaagatggagatcaatgcaaggatgtccaatccaacacttctacttaacattgtactggagattgcagctggtgcaataaggcaaataattaaaagttaaaggcatccagataaaaaggaaaacataaaactctattcacagataacatgaccttgtctgtagaattcacaagcagataaaagcctgctagcactaaaaaatgaatccagaagctcccataggatataaaatcaaattaaaaattattaacatatttctctatacaagcaattaaaatctaaactttcctatcacagtagttacaaaaagagagaaataggaataaatttaggaagacagcagagtttgttgaaaactacaaaacattactgagagaaattaaaggtctaaattcatggagagatgcggttggaaagctcaataatattgttaagatgacaattctccaccaagagatctataggttcagtacaatctctatcaaaaccccagcaggcattttatggaaaattgacaatttaatcctaaaaatgtatgtgaaaatgcagaggatgcagaaaagccaacgcaaatttgaaaaaaaatggaatgtcatataaaactacaataatccagacagtgtgaaagcgagagacacagagattaatgaacagaagtgagaatctagaaagacattcttacatttttttgtcaattgatcttcaatgaagttgcataggtaatatgatgtgacacttatcgccatataaaatataagctcaaacaaattagagacctaaacagctaaaatttataagttaaaaccataaaatttctaaaagaaaatataggagaaaatttttgtgacattgagtagttaggcaaaagattcttacataaaatacaaaaaacatgatctacagatgaaaaaaaagtgagagacaaattgggcttagttaaaatttaaaacttaagtgctccaaaagacaatattgagaaaatgagaagacaagccgtagattgagagaaaatatttcacaatttatcacaaattacatctgtgatgaagaacatgtatccagaatatgtgaaaagttcttaaactcaatgtaagaagatgagcaactcaactaaaaatgagcaaaacatgctcaactgacttttacaaaagcacaaaagcaattcaatgaaggaaggagagcttttccatcaaatggtgatggaacaactggacaaccacagtggaaaaaaaataacctgagccaaaacctcatgcttcatacaaaaataactcaaaatgagtcacaagctttcatgtaaagcacagagttaaaatggcaaacattgagccaggtgtggtatcacaggcctgtactctcagctactcaggaagctgaggtgggaggatcccttgagcccaggagttcaaggccagcctaggcaataattttttttctaaaataaataataaatttaaatttttaaattacaaaccttttaagaaaaagtcatcagagctaagactggacaaagagttcttaaacataacaccaaaagtatgatccataaaagttaataaattggatcttatcaacactaaaaactgttgttctgtgagagacctatgaagagcataaaaagacaagctacagaatgagagaagatatttgcaggcaacatattctgtaaagactgtattcagaatatatgaagaaattttaaaactcaacaataaaaatgaaatccaaatacaaaacaggcaatgagcaagacatgaacagacatttcactgaagaggataaatactgggctaataagcagatgaataggtgctcaacatcattatccagtaggaaaatacaaattaaaaccacagtgatgagaatggctgaaatacaaaataaaggtagcaacagatgctggcaaggacgcagaggaactgggacactcttatattgctggtagggatgtattttaaaatggtacagccgctctggaaatgagtattgtagttttcttcaaaccgaacatgcaatttaccttatgactagcaattgccctcctaggcacttatttcaaacgagggaatactttatgttcacgaaaatcctgtgcacaaatactcttgcagctttattcatgatacccccaaacaggaattaatacaactgtctttccgtaggtgagtgagatctgctggttgaaataataactgagtcacacaagtgccctttctcaaggctaccatcctgcttctctgtgcagtaagtgttttatgcatatttcccattttctcacaaagaatattaaacacgtatactcaaggatcaaactttaatccacataaattttttactgctccatcaaagacactcttaaatgggactgcagtttggagccactgcctggttctgctaaggtgctgggtgtgttaccgaccttggcatttgcagcactatggaaaagtcaacacaatgaaacaggcagatggcatcttggtattactgtgaaaacaagtctgcctccaggactctctgaaggctgctcaggggacacactttcaaaatggcaaagatcaattatggttcctagtgggacacaacccctagcctattcctattcagcactgtcttgctctctattttccctcattcttccaacttataactgtataaattttcaaatgtgcaaagaagctgaaagaatggtgcggtaaaattcaagctaccactctgccgtatttggttaatatctctttatatacataaaaggagagtgtgaaatgatggaccatggagacccagaagggtaagggggttggcagttggtgtataatagaggggtttcttgataggtacaatgtgcttgtctccagtgctggatgctctgaaggccctgactttaccacaaccaatatagcaatgtagcaaaattgcacttgtgcctcatgaatatatatgaatctaagaaataaaaaataaaataacataacatgtttctttatagatacaggtagacatgtttgtatagcatgtgtgtgaatgtgtgtgtgtgcctgtgtgtgtgtgtccacctgtgtgtgtgtttccgtgtagagaggcagcacaaattaagagattaagattttgtgactgagctattccaaagtaacttaaacataaaacacacatggataaatgtgtctgtgacaacaaacctgaatacaaacatgaaataatatgtctataaacacatctctagatagatagcttatgaatgaattccctaccccagctcccttactggttgccctgtgaacacagggagtcagggaacaggacccagctagggtccctcatccttctcttgcatccaggcaggtcctgcatccactctggctgcacagaaggctcccatccctgccttggtctgtttcacaggtgctcccctaactctctctgccaccactgctttatctggatggagctgaggctgccctgaccaagaacagcaccacccatctgtgtccccaagaccaggaagttaggaggaaccacacaacaaggtcaggaactatcccacctccccagtcagtctgaactgatggcgggagatgctgatgcttgctttactcatcctcaatcccagctcacttattcttcattaattcaatccaatctccccagcagtcacttcaccccagaagctgactgacctctactcttcgtaatcaggaaaccacaaagcactctccttcccctccctgatatcacccttcagctctacatcatcatatgtgggctctaactctgcagggaagatgttgccccacagggtcagcccctgaacactggctgcaaatgtccccccatcccttcccagccctttcggtgttgctgtgaatctgtccctcactgagaactggcggggagatgtgggggaggagggaaggtttctttatgctgtgtcaaagcatggagacagacctctccttctctcctgaacctcacactatcccttcccagacacttgaaataaaacgcagaccagaaatgtctatttaagagttaaatatctatagtataaaatatgaagacagagtagaatggggtaatgcaggagagcatgacagagatgacaggacctcaaggtgccaggaaagctggtgctgggccaggaccaaggagccatcagcaggacactcactcataatgctcacctataataatacaattactgcatatgtaatatatcaaaatataataaaataacaaaataacaaaaataatatggcacagctgcaaataccccatatatactaacccttttcattcatccaaccacaagaaataaatgctcgtagtttccccatgtcatagatgaggaaaatgaggcacaaagagagaacatgctggtgaggcctaggcaaggagttgaatccagatcgcctggctgcagagtctagttgccctcagtggagccagcgaacccaggagctgacaccagagactgagatctcagctgtgcactgccctggtggtctcctgtcccaaccaggtgttgacccaggccttgcaggctcacgcgctctggaaaaaagagagaaaccaataaatgctcccctgggtgcagagtgctgctttttattccctgaggagttctccctcctcagtcactcccaaatcagatttaccctttctctgacggaagatgacgtccccacttttttctccctcccatcgcacttttccagcccctgccagtcccctcccgtgactccatcaacatcagcacctgccctgtgtccaccatccattgtgcagtgagtgaaaggacccaggactaaggaacaagacccaggaggaaactcagtgccctttcctcctcctctcaagcctgaccagccctgacacagtgagaggcctccccaaagagaggccctggccctgtctccatgtccttccaggtctgggccaagtcacacacagtccttctcttcctgagaccccaggccctcttcacctgcagaggcacctgcataccagggcaggccctgcacgctgtgggttctgccctccaccagcagctcactgttcctcccctcccagctctgagcagacagctcctaactagagatcctatcaggaagccctggggctcacaggccctgcatggaaatatgtggctgccatggagtctgcacctgacctgatgctggggacccccttgctcaaggaggcccagcctgccctccccataacctgcatttgggctgtgcttgctcctgcctgtccactcaaccctggaaatgcagctccaccccagggctgctgcttggtgaggctgcaagcccttcctgtcccattcctaacagggattccacccaggccactgccatcgcagctcacaggggatcttcttcgcctgtggagtagggggtttcttcagacccctcatcctgaggctgcctctacgcaccctctgcacctggggattgccactgccacaggcactgtctcccacatggaccctctgagaaacgaagccccaaatttgacttcctgttctattcaacatcctttacaacatcagtattgggggaaatcctattaagattatccagctgaaattatgttgatggacaccaatacttaaagcaggaattttgagaaactaacatgtaattttcatgcctttttctggccaatgtcccagtgacctacgagaaaacctttcctgcctacagggaaccagaactgacaatccctctataggagacaccgcaggtgagagcaggagcaaccacagacctgcactgcccgtgctgtggttgcctcctggacggggccctcttgctgcagggcaggggatgaaccgtcccatctgcccaggcctgagtggccaactaactgtgcaattaggttcaaggatgagtcaccaccacctcactggccagacacacggaagtggagaaatggcagaaagactcgggtttcctggacaccccagactctcactgtcccctgcactgcctctgtctttgcagaaactcaaaactttctgcttgctcttttcctctcccctcaaacaacctgactgtgggggaaatgattctgactgtctcttattgtaaacttaccaggcagcgactacactaagaacaaaaacattggctcaggaaaggcaaggtgaggccacagagcacagaacaaagcccaaaaaacagcccactgggtactatgaccctcgggggctggaaaaagtaacacctggacatgggatgaaaacagggaccacagctgccctgacagagggctggtccccactccccaaatagcccagggacatctgcttatcaactggtccatattatctgcaaggaaacacagggagacaggggccatatggtgggaacccagaaaaagcacggtctcgagggacccagaggacgtgacacccctgagacagctcccagatgaggcatatggggagctgcaaagtggacagaggatggccatgtgcactcaggactctccctgttacaaggggacctcaaaggggctgtacacatgggggccctcattctgggcctcgtgggtctttttcttgatgtcctcctgatggctggagaaacaggggagggggatgcagagaggaagggactagaggcaccacctctccttggattcctctccagtttctagccctccctagatcacatctgcctttactatttgctccctctgagatagtgatcatccaggccctcagcaatcagcacgcaattcccaactcacccacctggatgcgacctggtaagcctgagagacagagaccgggatggggacaaagcaggcaccacggccctccctgctgcccactcctcacctgcagcaggaggaggccacagctggatgttcgagggccttggcccagccctggcttgggcaggacttaagggtgtaaaaaataacctacatgtgatggttcattttcaattctatgtgccttagtataggtttaagcaggccacatggtcataaagagataaagaaggaaaatgtactaagccaccatcccccctacttcttgctttccctttcatgcactggccaggcacctatcggttggggccccctcaacgaccccttccccacctcaccaaaaaatgtagtttaggctagcttgcaacatagataattgtaccctttcttatcaactaagtgcagccattagggacataagtcaaatgtttaaagagtcctgagacaatcacaatgcattatgggctgcaacaaaatgcagcaaaaaaaaaaacaaaaccctaaggaacatacttgaagtcttaaactaccaataggtgacatccgggaagatcgtaagtccttggtactcagctaatgagcaactgggggagggagttgcgcactagggaataaattgttgaaactctccctggtgtgcctgcattccagacacccaatattgcaaaaccgtcactaacactctcacttttgctgttctctgggtctcagagtccattctttgggtttggatgggtgcgtttgtttctcataatctagttgcctatatggggatctctgtgcttgtgtgaagtgagtgagactctgcctgaaaggagaaacacgtaccaattgattcatgtggcccattctatctggatgtcctggctcctcgcagaagccatagacaaacttgaaactgttattcaggacacaatgaaagtgacatgggggtacgggagggtggggtggaaagcgggcaccacagcaaccaggcaacctcatgtgtcttgtggaaggcactgaaagtactgtgggggtcacatcaccatgagagagctgaaggatgtggggtggtgttggggctgtctatcgtctctacgtaatccagcaaactgtccctgagggagcctgatgatgcctaaagaatgaatgagattactctaggtatggccaagtaggagttataattgcagcttttatgttgtctggatatcactggtagagcagattaataaatccttgggcccacagtgtgcagctgcagacttggtgagtgcattcctttccactccaattagaaaggggatatggaatgattcacattcatgtgggatccacaacacatttatttatcatttgcctcagggctattgtaactcctctgcccgctatagtatatagtcttaagactacactagacatactggatatcctataggatattaaatcagctcatttcattgacaatttcatgtttactggggtggatgagcagcaggtagaaactgcactggagtccttggcaaaacaagcacactccagaaggtgaaggtaaaccttacagagcttcaagagtggccactgaagtgaagttttatgggtgaacaagtgccaagtgtttaggggaatgcaggtgtgtcccctccaaggtaaaagacaaactgtttcatcttgcatcctcaccagaaggaaggaagcacactgcctgatgagcctctttgagttctgatgacaccacattccacatttaggtgtgttgctttggcccacactctaggtgacataggaggaggccaccttcatgtggggcccacacaggaaaggaccttgcagcagatccaggccatggtacaagcagccagcatccctcagaccccttggggctggtggtgccagtggtggggaaagatgcaggatggagctgaaccaagcaccagtgggagagtcacaatgaagggcctgggattctggagtaagatcatgtcatccacagcagagacatatgccccctgttagaagcaacatttagtgttacttgtcctgatttgatagaatgcttgaccatgggacaccaaacaacaatgtggttccaagtggctgtgtgacccacaaagtcataaattgcacaggcccaacagcattcatcaacaggtgaaaatggtccacctgggttgagcttgaatcccttgctgacacccacagaaaacacccaagtctgaagtggcactgaactaccaaacagacaaatggcagttagccagccttcaccatgggtcagcccaggcctggtaggatgggtgcatgaatggagcaaccacagtggcaggcatgaggctatgtatgaggccagcagcactgactctcccagccctaccaaggtagatccagctactgccactcctgaatgtcaactcgtcagcatttggagcccatgatgtgccctagtggggcgctatttctttaggcgaccagccactaagtaacaagtgactacatttagctacttccatcctggaagggccagaggttcatcttcacagaaataggcccatattccatgggtgggttttcctgtcttgctctgacactcagccagcaccactctccgggtgctgttgacattcctgatctgcaggctaggcggtgctcctagcccattctctgcctgaaggacccatttggcctggaaagttttaaagtttccatggctgtgggttccactaatcctatcaccatctgcaccacccaggagctaccagccacaaggaatgctggacaggtcttctataggcacaactcagtgccagcctggaggaagcactctgaaagtgccatctttcagaacatggtacattgtttgaatcagagatgtctctatggtgctgtgttctcaatggaagaacatgtaggtccagaaatcaaaaggtggaagcaggtatggctccatgtccaatctcttagattcatccactaaggtattttgccttttttatctcccaacaatgggctgtgcgggttaggaggtcctggtttccaaaggagggtacccttaaaagtagacaaaagagagcccattgaactacacattactttagtcaccagagaagtttggagagcatgttcccagagaccacatcgtgagaagaggagtgtccttctctccaggcccaggtaataggccctcatccccaggaggaggcatggctgctttcacacaatgagggcagaagtgtgtgtggaaaccagacatccacctgggaaccttctgggtccccttgccccattgtaagtgtgagcagaatcatccagcaatttagcctgagaggatttgatttccaagaacccagacccatctgggcagcaggtttgagtcacactcctgggtaatctcccaaggccctgctcctgtgctctgacatcctcagtagcattggtatggaggccctgcttcccatgggctgttcccagtcagtgatggctcacaccagtgacactaaggcaggacattcctgggagacaggggactcctctgatggccaatggtggctccgggtctcctccatggccttgctcaactctccttagattgcctgtggtctaggaaacatccagtaaaccttctctccttctgtccatcactgggggtcacacttgcatctcggcctgttgcctttcccagggtaacctgactccctcacaatatcgtctgacaggtatgtcccctaataaaatgctgtaactttaaccccatgatggcacttgctttttggaggatttggactacaaaatcattttcatctacacaccagtgtcctcttattccaatttgtaaaatccttttgtttattcaacttcttctacttgcgttggctccattttgctggtatttgtattatgtttttgagttcgtcaatgtttgttgatttaatcactaaatttgggggtagtttgttatgcagcaatggataactaatgaagccctcttacatttccattattctatacaggttacgtacatctgctttatttccttccattttcataatattggccatacgtagggtttctagtttctcaacgtgtattcttttctttattttagtttcttttcttttttgttccttccctttctccttccttctgtccctccctccctctctttcttctctatttccattcaacctctcgccttccctcctttttactctgctttccttcccttttcttccccttccccttccttcttttcttctttcactccttcttctcttcctccttctttccctcccttcctccattttttcctttttattatgaaaatttcctaacatataaaataaccctatgtgattgtgctataagtaagcattttctgaatctgtatgccaaaagtacaatgccacggtatatgagaaacaagtaaacaacagaaagttattgacagaatctaaataaaaatgcctgctataattctgcagccaagacagcggctttcaactcaattccttcaactcagtgttttcagaacacatcatcaacatcaagtattacgcacttatttcaaaagtttaagccaggcgtggtggttcacgcctgtaatcccagcactttgggaggctgaggtgggtggaccacctgaggtcaggagttcaagaccagtctggctaacatggtaaaaccccattgtcgcaatcggttactatgggatataatgaagggggatgaacacagaaataaagacaaagacaaaaagatctgttctaaaagaaggggtcgggggcttcttgcttctagtgattccttctggcagcaaactcagtttgtcagtttgccaacatcctgctttcatgagaacagtttgctgtttgctcatatagcctccagtggtatactgagttgatcacgaccctcattctttcggcctccaataccccgactctactaaaaatacaaaaattagctgggcgtggtggtgcatgcctgtaatcccaactactcgggaggctgaggcaggagaattgcttgaactgggaggtggaagttgcaatcagccaagatagcaccactgcagttcagcctgggcaacagagcaagacttcgtctcaaaaataaataaataaataaataaataaataaataaataaataaataagtttaagttggcacaatcactttggaaatcatattattattatctagtatggttaaaggccatataacatatcatccaatcatcccactcctaatcatacactctgcgggctttcttgcctatgtgcccaggagacatgcacactaatgtttatggcaagaactggaatcagctacatatatatcaatagaaaactagtgcaattatggtataaccataaaatgtaaaccttcagcagtaaaaacgaatgaatgacagcctcccacaccacagataactcctatatgtaatgtgcatcatgggaaaataaatgcagtaggaatttgctgtactggaagcttaaaaaccatcaaaactaactaatatttggattggggatatatctatacttattacacaaatccttaaagaaactctataatttctttatagatattatgaaaacagcaaggtactggtacaaaaacaggcacatagaccaatggaacagaacagagaactcagaaataagaccacacatctaaataaaggaataataatcacaagactcaggatggagtctccttttgggggatgtgaatgggcagcagcccagggtagtttacaggttctgtgttttacaacagtgctggctaaagtccaaacaacatatcatccattcccttttaaaatggaacttttaaaataaatgtgtaatacttgatgttgatgatgtgttctgaaaacattgagttgaaagaattgacttaaattcctaattccttaaacagattttttcaaagtaaaatatgcttggtttttataaaaatgaaagagaaaagaataccaaagttcattgcaagcatccttaacaagaactacttacattggaacaaaaccacacagaattgtaaggagccatgtgacagagaggaccacgaggccatgaaaacggctttggctacaaataggtcatttgatccttggctcactggcatctctgtagattttcatgtatacaatcttcaatctgatgtgcaaggtaattccatcttgcaaaggatttgatgttacattctaccacacataccactgaattaaacttttacagaattggaaatgcacatcattgatcaaaataaatgaaacaagaaaagagtagaaaggaataaccagtgacggaatagcaatatgaatagaaaacacaataggactgcgaaaacaaagaaacaaacaaaaccacttcagaagcacctgatggcatgctatttagaatcatagtggtgtccaaatcacttctatcacatatcattcaatatcacaacaaaagatgttaagtgtattatagaatgctgatcgaatagccagttattgaaaaaactagtttctcaattcgagctaacaatttcgtgatactgcatcaaaccgaagttattggcatgctagatgtgttgactgaagtatgagattcacatctttgtaaatgaaaagcaatctgattaagcaatatttttctaagtgaaagcaagttaattagagaaagaaacaaaggatggctactccagagacagagcagtacttctttttttaagtgtaggcaaatgttttttggaagacgatatttcaataagaaaactggcactaggggcatacttcccctaaatttgagacattttagacaaaacaaagacttattttcaaggcattatttttatagcactaaagtcttggaactatttgatctagttattctatgttctcaactgtgttaactcattgaagagaacattgctgttattaaagatattggcaagaaaaactcagagatactgttgtatctcctttctctgcctcaaactgttttcccctcaacacctaaggctctgtgatgtctcaaacttttagtcattaatttaaaaagtgaagcttatcatagaattagaaaaaaactattttaaaattcatatggatccaaaaaagagctcctatagccagaagaatcctaagcaaaaagaacaaagctggaggcatgaggctacctgacttaaaactatactacaaggctacagtaactgaaacagcaaggtactggtacaaaaacaggcacatagaccaatggaacagaatagagaactcagaaataagaccacacatctaaaaccctgtgatcttcaatgagcccgacaaaaataagcaatgggcaaaggattccctatttaacaaatggtgctgggagaactggctagcaatctgcagaaaattgaaactggactccttccttacaccttgcccaaaaattaacttaagatggattaaagacttaaatgtaaatcccaaaactataaaaaccctggaagaaaatctaggcaataccaatcaggacatagggatgggcaaagattttatgatgaaaatgccaaaagcaactgccacaaaagcaaaaattgacaaatgggatctaattaaacaaaagagcttctgtagagtgaaagaaactattatcagagtgaacagacatcctacagaatgggagaaaatttttgcagtctgtccacctgacaaaggtctcatattcagaagctacaaagaacttaagcaaatttacaccaaaaaaaaagcttcattaaaaagtggacaaaggacctaaacagacacttctcaaaagaagacatacatgtggccaataaacataagaaaaaaagctaaacatcactgatcattagaaaaatgcaaatcaatactacaatgagataccatctcatgccagtcagaatggcaattattaaaagtcaagaaacaacagatgctggcaaggttgcagagaaataggaaggcttttacactgttggtggaaatgtaaattggttcaaccattgtggaagacagtgtggcaattcctcaaagatttagaaccagaaataccatttgacccagcaatcccattaaaggttatatacccaaaggaatataaatcattctattataaaggtatatgcatgtgtatgttcattgcagcactattcacaatagcaaagacatggaatcaacccaaatgcccacaaatgaggaactggataaagaaaatatggtacatatacaccacggaatattatgcaaccataaaaaggaatgagatcaagtcctttgcagagatacgaatgaagctggaagccattatcctcagcaaactcacacaggaacagaaaaccaaacaccgcatgttctcacttataattgggaactgagcaatgagaatacatggaaccagggagaggaaaaacacacaatggggcctgttcggggagggcagtgatggggggatcattaggaaaaatagctaatgaatgccagggttaacacctaggtgatgggttgataggtacagccaaccaccatggcacacgattacctatgtaacaaacctgcacatcctgcacacgtaccctggaacttaaaattaaattaaattaaattaaattaaaagataagcttaaagcattaaagaaaaataattagataaaagaagtctttgatttacaaaatcctgaaacaatagttttaattttgcttttaacatatacgtaagtcctttagtacagctctctttcagaggtgcagcttaattccctctcttaagtgtggcttggacttaatgatgcacttctgatatggcctgtctctgtgttcccacccaaatctcattttgaattgtcatgcgaattctaatccccacatattggcggagggacttcatgggaggtgatcgaatcatggggatgattcccccaagctgtggaagtcagcggttgaacctatttttcctaatgctcccctcagcactgccctcccataataggctccagtgtgtgatgttcctctccctgtgtccatgtgttctcattgctcagctcccagttacaagtgagaacatgtggtgtttggtttcctgttcctgtgttagcttgctgaggataatggcttccagcttcatccatatccctgcaaaggacttgatctcattcctttttatggctgcataatattccatggtgtatatgtaccatataaggggattttccccacttcactctgcatttttctctcctgccaccatgtgaagaatgacatgtttgcttccccttctgccatgattgtaagtttcctggggcagcctcctcagccatgcacaactgtgagtcaactaaacctcttgcctttataaattacccagtctcaggtatttctttatagcagtgtgagaacagactaatacaacttctaactgatagagtaatgttgacataacagtttgtgactctgggtgtagaatgtgaaactcactatggcttccaccttctctctctctgtctctgggatcatgagctcttggggacccagctgctgtgccataagcagccctgcaggaaggtccatgtggctaagaactgaggccccctgggaccagacagcaaggaactaggcttttccaacagccatgtgactaagccatgtttcacatgaatccctagccccagtgaagccctcagacgatgcagccctaggctgacaactggactgcaaccttgtgagaggccctgagccagaagcactcaggaaaaccgctcctggattcctgaccattagaaactgtgggagatgatgaatatttgttgttttgagctgctaagttttacataatttgttacacaatagtaaataactaatacattttcacaagagaggatgtattattacacattaatttgcatttgctctaaatttatcatcatcatattactatttttgagacagggtcttgctctgtcacccaggctggagtgcagtggcatgatcaccatgcactgcagtgtcgacctcctgggctcaagggatcctctgatctcagcctcttgagtagctgggactataggcatgaattaacatgcctggctaattttctaatttttttgtagagatgggggtttcaccatgttgcccaggctgatcttgaacttctggagtcaaatctgccttcctctgccttcaacagtgctaggattgcaggcgtgagccaccacacctggtctaaattaactataagatattaaacatgtaacttagttttaaaaggaaaggagaatttccacggctgaagaggatgtattttattactattcacaatgatcactttacttgaacttcaatttccaactgtgtccaaattaaacacaaaaggaagatccagcccttcctgggctgattctatcatggctcccaacaaccagctcctggtcattcaccttcccccagttattcaaccaactctaatgtaggtgctgctgtgaagggatttagcagatataattaagggcctcaattagttgactttaggctgagtttatcctgcttggactgtcctaataaggagagtccttgaaaggactgggttcttcctgagcatagagattcacagtgtgagagggattcagcataaggggtttcctccactgtgggctttgaaaatgaaggggctgtgtaggaaaggacgctggtgggcaccatgcattgagtgcagccctccctgttctctacagtgacagccagtgaggaacagggacctcagtcttacaactgccagaaactgcattctgccacctctgtataagcctgaaggaggattcaaaatgaaaacacaggtttaggaagaccggaacagagattccatccacatcatgcccagatttctgattaagaaactataaacaacaaatgagtgttatttggccaggcgtggtagtgcacacctgtatcctaacatttgaggagctgacacaggaggaacacttgcagccaggactttgagaccagctaggataatatagtgagacactcgtctctacatttctttttaattagctgggcatggtggcacttgcctgcagtcctagctactctgaagactgaggtaggagggtcccttgagcccaggaatttgaggctgcagtgagccatgatcatgtgactgcacttcatcctggatgacagagggagactctgtctctaaaaataaatcaatgaatacaataaatgggtgctgtttaaagccaatgtttgtgacaatttgttacccagtcttataaaattcatacacagactcaaaagactcctggaatgaactgatgaattgatacgcacactagttacataaaataaaatcttttttaacttttttagtgttttacattttataattttctgtgatgcaatttaatacactcataattcattcattcagccaagaaaaaataatttagtccctacaatgaaccaggtatgccctcatatgctcaagtgcctgacattctagaagcttcacaagaatgaggtggagccactggagtgttttaggtggagaaatgacacactctgactcatagtagcaggaccactatagagagaacactcatgtagcaggtcatggaacagtgctagagccacagttcaggagtgagagggtggtggggattaaggggagaagagggcctgagggatgagagggacggagggaagggctggaggagcaggaggtgaggaaaaggagcagaggaaagaattccaaagcagcagaactcttaggtttaaacacattgttttatagattttaatacatccatctacagagcctcgctgggtgttctttgcagttggcctttaatatcttatgtgggtctgcctagaaactaattgttttttatgttaatcaggtttaaaaaatactaagtattcctaaaaaatatacactccactcacatgtggatacttcctaaaaacaggcagtgcgtgagcactagtgaggggcattgtgactgcactgaacacttacaactgtgaggtgaataaagtttgtgctggctcctggttgcaacatatagtaacatagtgtggtactttgtcttgaggagatgtcctggactcacacggaaacttagggctacggaatgaaggtaaatttaaaataaaacaagcgggagtcacagatacactgtctgggaaagtgaaacttaagagctttgtgagtcgtgttgtaatgcttttagatgcatttatataccaacaggccaaagtcacattttttaccgattagattcctgatcattcaggggttaccaaggttatgctacccactatagttaataaacaaaaagcaaactggtctctattctatctcatgcactcaggcacaacttttccagatttaagggggaaaaaaaaccctgtctttacacctacaatcccagggcgagctcactctctggcaacaagctccctggggtgatttttcttctagaagagtacaggaggacaggcaaggagtgggaggcagggagtccagttcagggacagggattccgggatgaaaagtgaagggagagggccagggaccttgccgagggtttctccctggtttctcagacagctcctgggccaagactcagggagacactgagacagaacgcttggcacaagagtagcggggtcagggcgaagtcccagggcctcaagcgtggctctcagggtctcaggccccacaggcggtgtatgggttggggaggccccgcgttggggattctctcctccttctcctaacctgtgtcgggtccttcttcctggatactcaccgggcggccccagttctcactcccattaggtgacaggtttttagagaagccaatcagcgtcgccgcggtcctggttctaaagtcctcgctcacccacccggactcattctccccagacgccaaggatggtggtcatggcgccccgaaccctcttcctgctgctctcgggggccctgaccctgaccgagacctgggcgggtgagtgcggggtcaggagggaaacagcccctgcgcggaggagggaggggccggcccggcgggggcgcaggactcggcagccgcgccgggaggagggtcgggcgggtctcaacccctcctcgcccccaggctcccactccatgaggtatttcagcgccgccgtgtcccggcccggccgcggggagccccgcttcatcgccatgggctacgtggacgacacgcagttcgtgcggttcgacagcgactcggcgtgtccgaggatggagccgcgggcgccgtgggtggagcaggaggggccggagtattgggaagaggagacacggaacaccaaggcccacgcacagactgacagaatgaacctgcagaccctgcgcggctactacaaccagagcgaggccagtgagtaactccggcccagggagcagatcacgacccccacctccatgccccacggacggcccgggtactcccgagtctccgggtctgggatccaccccgaggccgcgggacccgcccagaccctctacctgggagaaccccaaggcgcctttaccaaaatccccgcgggtgggtccgggcgagggcgaggctcggtgggcggggctgaccgagggggtggggccaggttctcacaccctccagtggatgattggctgcgacctggggtccgacggacgcctcctccgcgggtatgaacagtatgcctacgatggcaaggattacctcgccctgaacgaggacctgcgctcctggaccgcagcggacactgcggctcagatctccaagcgcaagtgtgaggcggccaatgtggctgaacaaaggagagcctacctggagggcacgtgcgtggagtggctccacagatacctggagaacgggaaggagatgctgcagcgcgcgggtaccaggggcagtggggcgcctccctgatctcctgtagacctctcagcctggcctagcacaaggagaggaggaaaatgggaccaacactagaatatcgccctccctctggtcctgagggagaggaatcctcctgggtttccagatcctgtaccagagagtgattctgagggtccgtcctgctctctgggacaattaagggatgaagtctctgagggagtggaggggaagacaatccctggaagactgatcaggggttccctttgaccccacagcagccttggcaccaggacttttcccctcaggccttgttctctgcctcacactcaatgtgtgtgggggtctgactccagctcctctgagtcccttggcctccactcaggtcagaaccggaggtccctgctcccccgctcagagactagaactttccaaggaataggagattatcccaggtgcccgtgtccaggctggtgtctgggttctgtgctcccttccccaccccaggtatctggttcattcttaggatggtcacatccaggtgctgctggagtgtcccatgagagatgcaaagtgcttgaattttctgactcttcctttcagacccccccaagacacacgtgacccaccaccctgtctttgactatgaggccaccctgaggtgctgggccctgggcttctaccctgcggagatcatactgacctggcagcgggatggggaggaccagacccaggacgtggagctcgtggagaccaggcctgcaggggatggaaccttccagaagtgggcagctgtggtggtgccttctggagaggagcagagatacacgtgccatgtgcagcatgaggggctgccggagcccctcatgctgagatggagtaaggagggagatggaggcatcatgtctgttagggaaagcaggagcctctctgaagacctttaacagggtcggtggtgagggctgggggtcagagaccctcaccttcacctcctttcccagagcagtcttccctgcccaccatccccatcatgggtatcgttgctggcctggttgtccttgcagctgtagtcactggagctgcggtcgctgctgtgctgtggagaaagaagagctcaggtaaggaaggggtgacaagtggggtctgagttttcttgtcccactgggggtttcaagccccaggtagaagtgtgccctgcctggttactgggaagcaccatccacactcatgggcctacccagcctgggccctgtgtgccagcaccttctcttttgtaaagcacctgtgacaatgaaggacagatttattaccttgatgattgtagtgatggggacctgatcccagtaatcacaggtcaggagaaggtccctggctaaggacagaccttaggagggcagttggtcgaggacccacatctgctttccttgtttttcctgatcccgccctgggtctgcagtcacacatttctggaaacttctcgagggtccaagactaggaggttcctctaggacctcatggccctgccacctttctggcctctcacaggacattttcttcccacagattgaaaaggagggagctactctcaggctgcaagtaagtatgaaggaggctgatccctgagatccttgggatcttgtgtttgggagcccatgggggagctcacccaccccacaattcctcctctggccacatctcctgtggtctctgaccaggtgctgtttttgttctactctaggcagtgacagtgcccagggctctaatgtgtctctcacggcttgtaaatgtgacaccccggggggcctgatgtgtgtgggttgttgaggggaacaggggacatagctgtgctatgaggtttctttgacttcaatgtattgagcatgtgatgggctgtttaaagtgtcacccctcactgtgactgatatgaatttgttcatgaatatttttctgtagtgtgaaacagctgccctgtgtgggactgagtggcaagtccctttgtgacttcaagaaccctgactcctctttgtgcagagaccagcccacccctgtgcccaccatgaccctcttcctcatgctgaactgcattccttccccaatcacctttcctgttccagaaaaggggctgggatgtctccgtctctgtctcaaatttgtggtccactgagctataacttacttctgtattaaaattagaatctgagtataaatttactttttcaaattatttccaagagagattgatgggttaattaaaggagaagattcctgaaatttgagagacaaaataaatggaagacatgagaactttccacagtacacgtgtttcttgtgctgatttgttgcaggagaggagagtagatggggctgcgcccagtgggtgctcaggccaccatgaactttatgtggtcactgctcagctgggtcatctttgctgctccattgtccttggcccttcagtagaaccttgtcccaccaggacctgtgatcacatagacttggatatcacctaggatggtccctacacgtagaagttcctgtgttatcagaagaaaaattttcagacccctacacctcttcccctccttccaggtctctttcaattgtattttccatctttttttttttttttttttttagatggagcctcactcaggctggagtgcagtggtgcaatctcaactcattgcaacctccacctcccgggttcaagcaattctcctgtctcagcctccctagtaactgggagtacaggcacatgccacaatacccagctaattttttgtatttttagtaaagacgggatttcaccatgttagccaggatggtcttgatctcctgaccttgtgatctgcccgcctctgcctcccaaagtgctgggattacaggtgtgagccaccatgcctggcttccccaaccttcttaaaggaagcagattctgaaacttcccgagaggagaggtcccagagtttttcattgtagtttactttctgttggaactcctcttctgctctctctcctactcttcttcctgccctgagttgtagtaatcctattgctggctccaaaccaaactcatggatttgtaaagcagagtctaatttagattcatatgtggttggataattggagccataagccttgggttatctttcctcaagagacaaatatggttgtgtgctgcagtgtgcaggaggattggtgtgggaggagggagggagggaggacacaaaagcagccctggtgagaaaagcactggtgcatttatatccacatgagataatattgttccacagcggctacaaaatgacatttggcctgagtctacattaataaagatattgcctttagaataggggggcgcactacagtaatcatccattcaagtggcatttgttgtctgctaggtatttgactgtttttgcatttagaaaacatcgttaaagtaaaaacagaaaaatttctggccttgtcgtgtatacattctagatgcaagcttgtccaacctgcagctctcgggatgcatgtggcccaggacagctttagaatgtgacgatttttttgcttatctgtagtggcagatatcatgaaaattatccatgcattttttttcttttttctatttttttctgctcatcagctgtcattagtgtattttttgtgtggctcaagacaattcttcttcctatgtgacccagggaagccaaaagattggacacctctgcaggcagatgatatagtataagcagagtaggaacagaaaatgcttgagttagaaggtggcaagtgctgtgtggcaggtgatccagagggtgggctgtgggtacagggaggtggctgttgtgctgggtggtcagcatgggccttgttgcaaatgtgaccttggagtaaagatttgagggatgtgaggagttgtctacacggatgtctcagaaagttcttttcaggcagggaaaccttcagtgcagatgcactagggcaggaaattgtctgtgttcctggaaggaggaagaggccagaagtgttgaacagagagaaactgaaatgaagtcagaggtgtgcccagagcaggttgccctggagggtgtgggaaggatgttgacctttgctctgaatgacatggggagttagaggacagttttggaaagtgggacatggtaggacttatcctttgaaagcttctctctggctgctgtgctgagaacagaattgagaggtgggggactagtgaggcagtgggaaaaacggtgggaaaggagtgcagtattccaggatggagacgtcgcttaccttgactggggtgtgagcaggggaaatagtgggaagtgatgggattctggatgaattcacagcacttgctaatggatttatctgtggtgtgagaaagaagaatcaaggacacccacagtattggactgagtgagcagaagggtggagctgctgtcaatggagatggggagactctggcaggagcatacagaggagagggcattgcaggcatccagtggaggtgacatctacgaggaatgaaggtgaggggcccagatgcctctgcagctacagattcatcatccaatcactatcctacttccaccacccctgtgtctcagagccagagcattgattctcccctgtgctgtctgcacaggtaggtgaaagtcagggaagttatggtctgctgttggttataataagtcacagattattgtgctttctcagataattaaagaaataataagagaatttgtaactagaacacttactgagaagaccacaataatgcaaagttttttattcatctaaagaaggcaacagaagaaaaatagttgagcaagaaagataatattagaaggcagtaaatgaaaatggacagacttaaacccaatgaggtcaacaatgacattaaacgtaatggactcagacactccaattacaagacaaatagtgcagagggataaaaataaataagtaaataaataaataaccgtaggctatttacaaaagccataatttcagtagaaggtacagaaaagttgaaagtaaaaagatagaaaagaaataccagacaaacattcatgaaagaccacatggagatgccatttagaaaaattacagcacatgagtctcctgagacatagagtacatgtagacagctcacagtgtctttttcctttttttcagagacagggtctgttgcccaggttgaaatgcaatggtgatatcagaccttactgtaacctcaaactcctgggctgaagcaattctcctgcctcagccttctgagtagctaggacgagaagcctgtgccgccacacctggctataatgtctcattttctcatttgctgtggtgtgaacaaggaaacaatatcataccatgtatttgacttgcagcaggtacacaacaaatgtcaggtgaatgaagaaataaaaccacttagtaatccaagccatatccacatttacattttacaggtgaggagcaacatcccagacaagtaaagtaaaataaattgatttacatcatccagagcagaatcgagaacacattccctgtgctaaaggaatcagaactctactaggggtcatagcagatatcatgcaagtcacatatgttaattactagaactggagttgatacattttgagatatactaaaccaagggtttggaaggattaactgaatgcagaaataaaggaagaaaatagatttgtttaaaagatggttagaatctttaaagaaacaacatctttttaaagtggccttatgtggaccaaagcagagatgagctcaaatgtcaggtgggaaaatgcttgactaaatgcagctctagacccaagggagacctaaaaatcctgggacattttcggttgtcacgtggggattggtgggagggggtgagtggggtgctgctggcaaacctcccacaatgcacaggacagaccacaagggattctctgtctcaaattcttaatagggctgctgttgagaaacccgcccgagaggtaagtgctgtaatgtcctcaccatttcacagattaagaaactgaggcaccaggaagaaaagtgtcagtaggaccagagctgaaggttgaatccaggccacctggctgcagggtcttggcttccctggttaagtcagggacccaggagcccaccacaaacaatcccagctgcgcggtgccttcatggtctgtggcgccccctggtgttgacactgggcctgtggccaaatgaggcttgagggaaaaggaaaacgggtttaggtagcgggatctccttcaggctctccagatttcaagccatgacttacactcagaaaaaataatgttcaccttaattatctccccaaccctgtttttcccagttccggccagtaccctccctcgactccatcaacatcagtacctgccagatgcccagcacccaccatgtgaggagtgaaaatgccccaggactaaaggacaagatgacgttccaccccagccatcccgcccctcctagagctctagctctgtgcatttagtgcttaggcttttaacctggggtccgcgaacccactttcccatgacactgcgtgcagaagtgatgttacatgcacacatgacttcattacaggacattggatattaatattcatccgatcaactgggggcccaagataccactcttcccccaacagtttgtgatcctctgaattaaagaaagggcagagattgagggaggccctaactccaaatcttctaccacttctagggaagtgctgaaaagaagtgcaaggtactcaacccgctctgggaatacagcaggaaagcagagtgttcatggatttcgaattccatcaaagaaatacaactttggcaaaatatccaagtcacttttctaagccccaggcagcagctcaaaacaaacaacaccaaaaacaaaacaaaatctcggcccaggtgaaatcattgaagacataaaactttgtgagacctgtatttagagcgaaggacaattcaatttagggctgcagcagaaaacccctacatcatattgggtttttcctcatcatgaagttctcctggagggaccttctcccttcagcagtgcatagtgaggccatttctgtgtaaaaagatagaatctccttggattcctgatgtttacatttactactcacttctttgactttgtagatgccaacttcacattcaacatctttcaattattttctttactttgtctaagcagagaatttaaacttgtttctgaagcagaaaaccagggactggttatttgagctatcaccccactctgtggctctcttatgcaataagcataagagattgtgggccaacagaatttgtagcaagataaacataaacccttcatttcagcctatgtttctgtttgtctggtgatgttccagtcttgctccagtcttaacattttaaaaagtataattttacttaaatttcattttataggaagtcatatgtattcatttctgttaggtttctcagtgaaagcctcctcaaaacaactgtgaagtaaagacatgtaaataaattcatggtgctcccatgtattcgtgctcattgcatcttacaaatgtgtcagccccactgcaacagatggtgcatcaacaaatggtgctggaaacctggatatccacatgcaaaagaatgatgctggacaaaatttatgcccttccattacacccttttcaaaaattaagtcagaatgccttaaagaactaatcttaagagttaaacctgtaaaactcttaaaagaaaatactgagggaaagtcttatggtcattagaattggtagtggtttcttggctggtgaccaaaagtacaagcaataaaaggaaaatgacaaataagacttcatcaaaatgtaaaaacttttttgcatcaaaggacgctattaagaggtgaaaagaggctaggcgcagtggctcacgcctgtaatcccagcactttgggaggccaaagtgggtggatcacctgaggtcaggagttcgaaatcagcctggccaacatggcaaaaccctgtctctactaaaaatacaaaaattagccgggcgcagtggtgggcacctgtaatcccagctactcgggaggctgaggcaggagaatcgcttgaacctgggaggcagaggttgcaatgagctgagattgcaccattgcactccagctggggcatcagagagagactccgtctcaaaaaaaaaaaaaaaaaaaaaaaaaaaaaaaaaagtgaaaataaaagaaactgcatagaataagataaaatatttgccaatcacatatctgataaagaattaatatccagactacatacagaactacaacttaacaatagcaaaacaatctcattcaaaaatgggtaaaagacatgaatagacaattctccagagaagatacacagtaaggacataaaaataaggaattccaataaggacatgaaaatatgctcagcttcactagtccaggtgttggtgaggatgtggagaaaatggaatgcttgtgcactgctgctgagagtgaacaacagtgcagccatcatggaaacaggatgacgctttctcaagaaggtaaacatagaatttccatatgaagcaacaattccacttttgggtgtataccccccaaaaattgaaagcaggtatgcacacagataattgtacagtcatgctcatagcagtgctattcccaatagccaaaaggtggacgcaacccaagtgtccatcagaggatgattggaaaaacaaaatgtggtgcatatacacatggaatattaatcagccttaaaagtgaagaatatttggattggatggaaccttgaaaacacgctaaataaaataagccaaaaaaaaggcaaatatgatatttcacttatatgaggcacctagaataagcaaattcacaaaaacagaaagtagaatacaggttaccaggggctgaaggcaggaacaatgggcagctgtcatttaatgggtacagtctctgttgggatgatgaaaatgttctgaaaatgcatgttggtgtttgtgtaaccaccatcaattgtaaatgtgcttaatgccaatgaattgtacactgaaaaaaattgttagaaggtaaatcgtatagtatgtgtgttttaccacaattttaaaaatatatatcaacaccaaatccaatcacttctcactcctctgccacctccaccccagaaccatcctcactaggatagaaaaccggaagggccttccagctgggctgcctgctgactctcatgcccactgtccatcacccacacaacagagagagcgtgcctttccaatgggaattagggcatatcctatgaacgctccagctccttcccttcttaggcacaaggaaaccccagtttcccaccatttcctatgcactccttatcacagggtcccctctggccactttggcctcatcccattactctcagcctagctcattcttctccactcacaccagtttcttgtctactccaccctgtctctaccacctgcccctgctgtgactcccacatgcatgtgctgcccagtgatccacatggctcactcctcacaccattaaggtccctgcttaaatgtcccatggtcaagtgttcagaaatgtcttgtccagtgacctcttctgaaatctatcccctgccattcccaccaccgccaccaatcttctaacccaagcatatttttcttaatggcaattatcagtgatactatgacaggttttatttgtttattgtctgttgatttattaaggttaccaagaaagaaagaaccaatagcataggtacatagatgatagatagataatagatagatagatgatagatgatagatagatgttagatgatgatagatagatagatagatagatagatagatagatagatagacagacagatagataggtgatttattgggctaattggctcacacaattatggaggctgagaagtcccatgatagactgtctggaagctggagaactagaaaagccagtagcgtggctcagtccaaagtcaaagccctgaggacccagaatacagaacaggaggataaaggggctcactggtgcaaaagtcagagtccaaagatcatcgaacctggagttttgatgtccaaggcaggagaagaagggtgtcccagccccagttccagagagagagacagagacagagagagacagagagacagagacagagagaaattttacttctatctacctttctgttctatctgggccactaggtgattggactgtggctgcccacagtgagagagcatcttccccaccagtccacccactcacatcccttccagaaaaactctcacagacactggtttaatacttacaatttgagtagtctataatttatttttttgagattgggcttgctggctggagtgcagtgttgttcatggctcactgcagcctgaatcttccaggcttaagcaaccctcccacctcagacacccaagtagctgggactacaggcatgtgccaccaagcccggctaattcttttgaattttttgtagagacagggtttctctatgttgcctaggctggtcacaaactcaggggctcaagcaatctgccagcctgagcctcccaaagtgctggaagtacaggcatgagccaccatgtccatcctgagtgttctatgaatttttaaaatcacaaccatagaagaatcttcatgtacaaacatgcttgtcaaaatattctttaccaaaagacaagatgaaagcacatggatctaaaagaaccctggtgacttctccttgtttgagatgggatgcagcttctagaagtgtgtaaattttatgcagactttatgacatggaaaactactttcataataatacattcaaaaagcaacttcaaaataacccacaaccactctgggaggccaaggtgggtggatcacttgaggtcaggtgttcaaaaccagcctggccaacaagtgtaaccccatctatattaaaaacacaaaattagccaggcgtggtagtgcacatctgtaatcccagctactcgaggggctgaggcagaagactcacttgcatccgagatgcagaggttgcagtgagccgagatcatgccactgcactccagcccctgggggacagagtgagactccatcttaaaaaaaaccccaaaacttatgaatgcaactttctacaatgaaagcatatataaaaatatatacatagaaaacaaaagaatggaagtcagcatcactgcagaagatagctccagggatgaccattcacactgcagtccaggaagtttcaataatatgatagcagtggttctttggaggggaagcctgggtgatatttctttcttctctgcatttttttttctttaaaattcaaccaggtgttgatgtgtgcattttaaattcttctgtaatcaaatacattttcatatttctaatgtagaaacatgtatttttaacattcaaaataaaacatttgaagtaaaataacaatgaaaagtggctgaacactgtggtgggcacctgtagtcccagctactcaggaggctgagataggagaatggctcgagctcacgaatttgaggctatggtcacacctgtgaatagtcactgctctccagcctggagaacatagtgagacctcatatttaaaataataataataaaaagaagttcagatctccttccaatctcaacctaaaacaaatttctcatttgaagtccatatggcagaaatgcctactgatggctcctccagagagtaaaaaaaatattgttcctctacaatccatgactcatccttctgttacagtgttcacctgggcaatgaagtcaacactgagaatatcatcaatttatggaatactgattatctcttttatagatatataaattataattatgtatatatatattatattataatatatataattaccatcacacctgagagagtgagatggattcttttcttccacagatgaaaatctgagtccctgagaacctagggttttggtatgggttcactgaaaatgttggccttgagaattaggaaacagcttcctgcaggcctgcctggatgtgagccacaccaatggagtctccacaacagcaggaagagcaactgagaaccctggaagcttcacacttgtaatgttccatgtccagcggcattcagttgatggatgggccaagataagaatacagctccttccttcaattgggggtggcagaggggtgaatcagtcagctacacataatgtgtgtggtgtttctacagatatctttaattactctgctgagaactccacctcaaatgtacaaaaactctgtactcactggtaagcaggatcctttttaggaaagcaaaggactttgctgacttaagcaaaacattttctctccaaatgaattatcctgattggataatctcttactcccactgaaattagccccagagttgcatttgagcatttgggtcaaagacagaaagtcattttgagggttgggcctggctgatcttggacaatgttctgaaagagggctttctacttgcagaagaacaaaggtttgctctgggtaggagatgatgtcctgagaagaaaagacagataggcagattctcaagcaaactcaggagtttactatacaaaagattttggaataccttcctcagcctctttttcattgtggtaaaatacacataaacacaaaggataccaccgtaaccatttaaagtgcacaatgcagtgacaatttgtatgttcacaatgttatgtaaccatcatcactctctagttccagagtgtttttatcacctcagggggaactctgcacccattaagcagtcaccctccatttccacctgccagcagaccctgtcgccacaaatccacttctttctctatcgacttgcctcttatgaatatttcacaaaaatgggctcataagttacgtagcctcctgtgactggcttccttcacttgtcttgttttcaagattcagcaatgttttagcatatgccagtgctttattcattttatgaccaaataatattctattgtaggaaaaaactatatgttgtttctccattcattggtcgatggacattttcttttaaatcaaataggaaaaacaagagaggaattacaaatatatatatgtgtgtgtgtatatatatatgtcttgtagggttgagaccatctcagtcagctttttttaacctgtgaatgtcgtgatttctccatcatttctgaaggagagttttgcagacatacaattcttggttgatagtccttttactttctcagctttaaatttgtcatcccaacgcctcctgaaccccatggtttctgatgaaaatttgtatgttaatcttattgaggatccattgtacctgaaaagttccttctctgttattgctttcaagatggtctgtttgtcattggtgtagactggttgattataacgtctctcagtgtggacttctaaaattcttgctgcttaaaatgtatcaagtttgttggatgagtaaaattatatttttcatcaaatttaggagatttgaagttattattcctccaaatagccattcttctttttctctctcctttctttgaggattcccaaaatgcatatgcttggtgttgtctcacagttttcttaagttctgttcatttttcttcataatttttttttatttctgcacctcaaactggataatttcaattgtcttacctttaagcttgccgattcttcattctgcatagtgaaagttgcttttgtaaaaaagtaaatagtaaatttactctagtaaaatatagtaaaaaatagtaaaattactctagtaaatttttcatttcagttattgcacttttcagctccaaaatttctatttggtttctttttaaactttctatctttttattgatgttctctatttgagttaagatagttcttctgatttcctttagttttttgcccatagtttcctttagctctgtgaacatatttaagcagtcaattcaaagttgtttgtccagtaagtatgttcaatggcctttctcaggaacagtttctgtcaattcctcttttttcttgagaatgggtcttactgtctagtttaattgcatacctcatttttattttgaatactaacatgtggtgactttgaaaatcatgttttctaaactatttttgtatagactgtattctttattgtgtgtcatcactgaagtctctattctgtaagcttagtggtcaactcatgatttgatagatatttcctgaaacatcttcagccaaaaagaaataagaaaagaaaattcaatctttttatctgggctctctgtgtgttttggggcatgccctcaacactctgctgggcagtttacaatactgctttggccttcatttcctacttgtgcagatattgaaagttagcaagaggtgtgaacacagggcattctcaggtgctttgtgagtctgtgcgacatactggtcatgaaggaggctatacagattcccagggatatggaagcttttcaaaacccatattcccatctcactcacccagtttctcctccaggcttttctgtatgtctattacctttctcatgtaatatatttttgccccaagggggcagctgctggttcagtggcacttaaatggttttagcagatgccctctgcctctgtgacctaagagagttctgagtagggaaaataaatgcaaaccatttattttctttttctttcttttttttctttttttagacaaggtcttgctctgaagcccaagctggagtgcagttgcacgatcctggctcactgtagcctcaacctcctgggcttaagcaatcctcccacctcagcctcttgagtagctgagactacaggcacatgccataatgcccagttaatttttgtattttttgtagaaatggagtttcaccatgttgtctaggctggtctcaaactcctgaactcaagaaatgcacccagctgagcttcccaaagtgctgtgattacaggcatgagtcaccatgcccagcccaatgtaagccatttcttatcatccttcacggagtcacccaacaggaaaaggtagacaaccacaacactttgagaacatggtccactcggctcccactggcattggagcccacactaaggaaccaggctgctgtcttcaagatcactactgacttgaacagggaggaatgggccaagggtaagatatggtgccacaaagctctgctcctgagttccagttgatttttctggacttgctaggttgcaataaacctttgatgatttttcagggttccaatgcagttgattctttatcaacccaatcagaatatctggtggtaggtccaggaattcttgctttaacagctctccgagggaatttttttttttttttttttgatggagttttgctcttgttgcccagggtggagtgcaatggcatgatcccggctaactgcaacctctgcctcccgggttcaagcgattctccttcctcacctcccgagtagctgggactacaggcgcgagccaccacacccagctaattttgtatatttagtagagactgggattctccatgttgatcagtctggtctcgaactcctgacctcaggtgatccccccacctcggcctcccaaagtgctgggattacaggcatgagccaccatgcccagccaagggatttttttttatagtgatgttttacaagcacattgtctctgtgcagaggtggcccttggagttcctatgccactatgttctctgatgtcactcctcagccacctttgaattgtgcttatgcatcagaattcctgatctgctaagtacttccaggaaactcattcaaatggtaaacatcattaagcacctaccttattctgggtactgtgctctatggagttgagcctcagataaaagaatcaaacttccttggacttcatagaagtcaaaggtgggggtgggaagataaataaagaaattatagcacagcatgttatgtattttacatgacttttttctttgaaagctacattattaatattttatgacagtactgagttacatataccaaagattacaaattaaaatttatgctttctttctctcttttgttcttacatatttctctgttcttgtagatattttgaaattgggtattatggagacagtgcaacagtttcatttatatgataatgttttgttttacctttattcatcaaagagagatttgtcagctgcaaatttctagtttgacattggttttctctcagatctttgatgattatgttgcttctggctgctgtggctgacaggggatagtcagttacattttaaccagttgcttcttagaggatctgtgtttctcctgtggcaaattttaagatatctgtttctctttaacatcttctgttccagtgcagtatgagtaaatgtggatctctttttattcacagtgctatgatactgttaggtatgagttctaaatttctcttaaaataattaacatgtcagtatgttcaattctttgccctctacttttaaacttaacttcctcataaagcaaccttttttgatcacctgttccaccctgactcatcctgattacttgctccagcctgactcattctggttacctgctccaccctgactcattccagtcacctgctccaccctgactcattctgattacctgctccaccctgactcatcctgattacttgtcccagcctgactcattccagttacctgcaccaccctgactcattctgatcacctgtttcactctctttaaattagccaatctgaattagtttagcctgtgcggtctaaccctagccaataggggaataacacagcagcaggggccacgtgcatcagggataagaaccccttccccttccttgtccaggggtgtgctcaccattgctccatctgtgagggcacacccttgtatagaagtaattgccttgctgagaagaaaaaaagaaaattttatatttgagtgctatttctttgtggcatcaagactttatttacaataatacatttccttaatattttaagataacctctttctggaatgcctctttccatttactcacttctcttcttctaggaatttaattagagaagaattaaattaaacctcattcaaccaccatatacactgtggaatccaaaataatggcctcacacatatgtccaagccctaagacgcagaccatttagatatgttactttacacagcaaaagggactttgctgatatgattaagagcatggacctttagatgtggagattattttgtattatttgagtggccccaatctgattgcatgatttctttaacctggagatgactggagaaatatgggtcagatggagtgctgaatttcatctagaataatttcttaatctagtaaaataacatcatctctgttttttattctttaattaagtggcaaaatgcattaaaaggtttaaagtttaaatatccttgcattcttgggctatataccttggtcaagacagtctgtttataacacattggttaatacagtctactaatatttttcttagaattttcacatctaattaattaaaagtgattttcctataataggtaaatagtagaagggggtaagtctcttattttacaaattattcaaataatacatgaaaagaaatggaagactgagactacaactctttgccatccgtaatgaatgaacagatctagccactgaacagcaatgacaattttcatcaccaaagggaaataaccagtattaaactcttccccttgttgaaaaacatgatatagtaccaccaaaactcacggggaaaaaaatctgaatagatgcaaacctctataccaaactacaaatttctagaaaatgcaggtaatagagatgcatattaaaccatagtttggggtgcaatccacaaaatacaaacaacaggaaactctaccagacaatattaatttcaaagggataacctatagaacaaataagaacaaaaaacttatttttattttttttttttttttttttttttttttttttttttttttagtggcacggcactttttattttctttaatcagaaaaataagccctgcgcttctgggatggaggccccaggtgagcaccggaggaaggggcccgggtgggtggggagcgagggggcccggaggccaaagcagatgctgcaccagaggctggtcaggacccgggagggcctgcgggggtggggtcctcatgagcaagtgcggggtgctggaggtcagcagctgcctggcctgggagccagggacacccatccccttcctgacacctgaggcagcccagctgggcaagaccaggcctgcaggaccagagcctcctgtcacgtggcgcaggggtccaggtggtcaacgctgctctctggaggaccactggttagagcctgcccagctcccctgaggtctggagacagtcaaagcccccccaaacaccccctcccttttgggcgagtggcgtgccttggactccagaagactcgagtggggctgccttgagaccaggtcctgagggggtggcaacacctgaccacaggtgggggccgtggaaggggcagggatgggcccaggggtagccttgtagtgtgaggtgtgcccgaccacatgtaggtcaacagccagacgggacgctgcaggggactgtggggaagccgggagaaggcgctgcccaccctgtggggtccccctcgcctggagaccctgcaggcaacccttcagtgcatgcccacgggggtggtggaggcagagtcctgagaggtgggggtgggagcctccgggtcccctgcaggtcctgacccaccagatgggcccatgtgccccctgtagcttgggggccctggaggtggacaccagcacctcctgactaccagggggagggcctggactgaaacccacaccttcaccattcgccactgggccactctgcaggaactgcagcaccccacagatccttcatgcccagcacgccactcactctcacaccctctcgcacacatgcacacacagcacgcacacaccaggctcacgcgctccgcacaggtggcacgccaggggcaagcgtgcacgtagactcagagatgcaaggacagtattggcaattcagaggcacagaaagacgctgaggggcccccagcaaggtccccgccctcaggggctgtgttcccctcccagggcacgcacaccacaggcagcaacgcgggtgggggcactgtgacgccagtggggggagagggagcatggcggggcggcaggcagacgcgggttcatctctcttcctggtgtggtgagcctcagcctgatcgtggcactgtaggggctcccgcctctggccgagcctcaatttccaacgacaaacagctcagccctgtctagacaaggcctcaggctagtccggcaaagcatctccagcccgaagggcaatgcggccttggcccttggggccctgccagggtgcagatcacactggagtgggctggaaaacccatatggggaggtgcctgcaggcatcaggctccagggctcacagatggggcctgacgggccatcccgggggcacaggatcgggtccaccgggaccgcaggggccggcagggatggcccagggccaggagcgagagccggggctgacgggccggcaccagatccaatagggaccgccgcggctggcacaggagccccaggagaggccggcagggtgggcccggctgccccaggagtgaagggcgatcgggaatggggagcaacggctggggtttgcagggcttgttggggcccatgagcggccgcaggggctggcagggctgctctgggcccatgagcggccgcttgggtgggcagggctgctccgggcccatgagcggctgcttctgctgcctcggccgtcccgggcccaggagtgaaggcgtgagtgggccgggctgctctggggcttccactaaccgctggggctgcctggggcgcagcagcgaccgccgggggcggctgggctggcccagcagggaccttcggggctggccgtactgacacggggctaggaaggcccgccgggggcagcagcactgtcctgggaggaagctggcgggccgtcggcgtggtcggagggtgaggagtggccgcgggggctggtaccgctggcactgggctagcagcgaccacaggggccggctgcgctgtcctgaggatgccctaccgggctggccacagtgacacgggctggcccacggccgcaggggtcggcagcggtgccacagggtcagcagggaccgcaggcgcctgcagcggtgccttggggccaggaggaaccgcaggcgccggcagtagaggcaggggaccaggagggaccgtggggccaggagggaccgcaggcgccggcagtggtgacacggggtcagcagggaccgcaggcgcctgcagcactgcctggggcctgggagtgcccaatgcggccggcagggctgggccgggcgtgaccgctggggctggcagagctgatctggggatggaaggagccgctggggccggcagggctgaccggggcccagaagtgaccgccggggctggcagggctgtttcaggcccagaagtgaccgctggggccagctgcgctgacccaggagtggccgctgggagggctggcagggctgcccagggtccgggagtgccgacggggctgggagggacccctggggctggctggactggctgggctggagctgttgtggcgctgggccgggccgttctggtcccagtggctggctgggagcggccccccttctggggagcacacctgcttggagggctgcagtgggacctttctcgccccatcgcaggcgggttcgaggtcctgcccggggctgcctgcctccaggggccgcctgttctcactgggctccgcaggggggcaggtttccgactcccggggcttcttgatgagacgacgctcccacttctccttccgctcatgtggcttcagggccatatccttctccagggcctccagggtgctgaagctggcgatggcgaagccgtcgatgacctcctcctcctgcgagctggactcgcggcggcggcggcgcgggggacgcgcggtgcggggcgcgggggcggcgcctcgggggggcgcgccgcggaggcccgcgttctccttgccggggctgggctcgggctcgtcgcccgacgacggactctgggcgcgggcgtcgcgggcggcctcccggcgccggccacggtcccgctgcgcgcgcgagcgccggctcgggcggaccttggcctccatggccgcgcgtgcgccccgtcgggccggtgaccttgacgccccgcgcctggctcgcagcaggcgggctccctcggctacgcggcgccgccgggctgagtgtgcgccgcgcgggctcgggccctgggcggcggcgggcggcgggccgggccgggcatgccgggcgcggggggcggctcagccccgggcccggcgcggcctgggacccccggcgcgggcggctgggcgcatcggcgggggcgggcccggcgctcagcggccctcggccgcccccccgggggcgcgccccatgcgcgcggcgcggcgatcgggccgagcgggcggggccgggcgggcgcggcaggcggcaggcgggcaggcggccgggctcctgggcaccgggctcgtgaggcggcggcggcgccccgaacccaaaaaacttatttttaaaggtaaaactaaactatcatttgggatgatgaaaatataaaatagaacaaagaagtgaggaccacaaaagtcaggatgtgatggatttttatttgaaaaaataaaaatttactattgaactgggtcaattgatggggcttctaggtcagctgacaaacttctctctctttctgatggttaaagagtgtttactgttgattaaaggtcaccattttaagattttttttcttttatgtcacctgtgttttatgacaaaaaggcgaacgcagaataaaatgagttatggggcacggttcctgttctgcacaaagcctcctccccatcctcctctctggacactgagcacccagaacaaccggcagccccaggacccctggcagggctgtctcattactgagtgtgcatccagctccacggttcctgttctgcacaaagcctcctccccatcctcctctctggacactgagcacccagaacaaccggcagccccaggacccctggcagggctgtctcattactgagtgtgcatccagctccacggttcctgttctgcacaaagcctcctccccatcctcctctctggacactgagcacccagaacaaccggcagccccaggacccctggcaaggctgtctcattactgagtgtgcattcagctccacgtcgctggagacaatgtccacagtttatttcttgagtcctggatgaacctgacaggacatagctgaggggaagcctggcccagtctgcaggctttggccatcagtgtagagggaggaggtcctcatctctccactggagcagttacaaccagagcctcctctctgcgtgggagtgaggctcggtccttcccctgaacacggtgacagggatctctccacaggtagagatgacaccattcctcctgtaacatggtccaatctcacgcttgttctgctttacaagaaagttgacccacgctggtgtcccctgaagaaatcacaggcacagaggagggacaggtggatttcagggctgtgcttgatctgggaaaggaagagtgcagaccgccaggtggcgccgctgcactgcttctgcgcccaggaggtgcctgctggggctgagattgaaggtggggagaaggatgtcacagctcatcgcacaggttcccggtaaaaatcctcctgcccagcctagcgggctctcccttaatcaactgtagcgaaaactgtctccttctcacgttcctggaaggtgctttttgacacaagaaagaggatgtgattgctagggtcatcatgtcattgtttattgtgttgccagtaaagtgaaatcaaaatacacaataaataataaaataacccatgataagccaatgtttataatgtactaacaccactgagccagtgtttataatgtactgacacactccaagtgtgggcacagctgcagacatgccttgtctcttgggtcaggacacagggtagagtgaaatggaaagaaatcccagtcactgcagaaaagggcccccatggaagaggcctggcagggaggccagctgtcccagggccgccatatttagggatgactccccctttctgggcagcactggtttttttaattatttttgcattcacagtagttctgaaattgcaggatgctgagacccagcactggtcagttacaccgtctcttcttcaccattaaatactgtgccaaacagcaccttcatacatttccatcctcttccaggagagaatcaaaacaacaatggacacattgatgcatgcaaaaatactttaaatatgtgctatcagaagtagctactaaaacattaattccactgaaatgagggaggctgtaaaaaagaaaaacattgcatacccgtattcacagcaacattactcaccatagccaagacaaggaagcaaacaaagcacccatcaacacatgaatagatgaagaacatgtggtctatgtaggcaatggaatatgattcaaccttaaaaagaaggaaattctgttacatgctgcaacatggatgaacctggagaacaatgctaagtgtaataagccaatcacaaggaaattccaatactgcgcaattcgttatatgcggcgtctaaactcttagaacctgaaagtagaatggcggctgccagtggttaggctggggggattcttgaggagattttcagcgtagagtttcagttttgcaagatgaaaagttctagagatctgttgcataacaatgtgctacagttcatattatagtactctatacttaaaaattgttacgataccaaattttatataatatggattttggcgcaatgaaaaaaataattagctctgataccaacttaggaaaagagcacatgaatttattgaaaatatattagcatgtgcttactatgaaaaagagatgcagaaaactgtgagacaaaaagagagatccttgctaccccagctattatccatgaaccagcagaaccagcatctcatgaaactggacagaaaggctcacaggcccagccttgacaggttgatcagtctgcatttgtcaggaccccaggtggctccactgcatgtaaagcaccgccccagatggtggtggagggagatcctaggaaggtgactctgtcccacaggtagaagcctccagtccagatgggagcagccagaagggcccaggagggacatttccaagaaagtaaaattaatagaaagttcaaagtctctaatttcttaacagagtcacagaaatggaacagatatcaaagttaaattaatgagagttatctagaacataaacaaaaacaaaggcaagtattaacttgaggaagaacaaatactacgaagcaagtgaaaagtagtcaagttgacatatgagaagatgagtcacggaaaaagaaacaaggagtggctgaattaaacataattactatataaatatactgggaaaaggaaagaacgggaagagtgaaagagaacaagtgatggatgtggtgacgtcgcgttctcccgggcggggccggaggcggtacagatgagggacacattcatggctaacaggaccgctcttctcgttctgcgttctgcttgcggccggtagtctctcctccccgcccatgggcggtggttggaggcaggggtgcggaatccggccgacctcgctgtcctcgccctctaccttgtggcgtcggtggggttggggagatgagttctccgacgcagcaggcacccctgctcatctcctatggctgttgccttttgggcagcccctcttcgcggcggtggggctgtcccgccggcctgtcacgttgcccttccctgggcttgtgaggattggctccgcttggacctttgcggtgctcccggagccctccaggttgtccctccggtgccggaggccaagcggtggtgtccttcctgttcccagcgccccctcctcctgtcgctgctgcagtgcctgtgtgtgggtcctgaggggttttggggaggtagaatatttttatttatttaaataaattaaaaaataagaaaaaaatacaaaaagaaagagaacaagtaatcttaactattgattccaccatcgtgcagtgcaatagtcaatggctgcaactgaaaaatcaagcaatgttaacaaagaaatggtgctttggtgcttagatatgtgaaagtaaagtcaaaagaatcagctgaaacttgaaagtggttgctccctagaaaggcagaaacagagaagagaggactctccctagaaaggcagagaagactcgtttttctcaggaagtcctgcgcaaatatttactctttcaattatgtgcaattgtaacttcgaataaaataaaaacaaaagcttcagttaacatgcaagtttatgcctaatgacaactttgtttaacaatgataaaaggctaaccaaaatataaaaacacttaaacataaaacagcatgtataaatgtgtatgtgacatcaaccctgaatacaaacttgaaagaatatgtctataaacaactctggatagatagcccatgaatgaattccccactccagcatctttactggttgtcctgtgagcctaggcagggaggggaccaggacctgactagggtccctaatactcttgcttccaggcaagtcctgcatacactcctgctgcaccgagggctcccatccctgccttggtctgtttcataggtgctcccctaactctctgccaccactgccttacctgggtggagctgaggccgccctgaccaagaagagcgccacccatctatgtgccccaaaaccagaaagtcaaaagaaaccttgcaacagggtcaggaactatcccacctccccacctccgaatcagtctgaactgatggcgggagatgctgatgcttgctttattcatcctcattcactgtgcatttatttttcactaattcagtccacatctcctagaagcagactgacccctacccttcataatcaggaaaccccagagcactttttgtcccctccagaatataacacttcagctctgcatcatcacatgagggctccaactctgtagggcaggtgtactctcacagcttcaggccctgaacatttgcttcagatgtacccccatcccttcccagacctgtctgtgttgctctgaatctgtccttccctgagaaccgatggggagatatcagggaggaggggagatttctttgtgctatgtcaatgcatctagacagagctctcattctcccttgaacctcaactctatcccttcccagacacttgaaataaaacacagaccagaaatgtctatttagaagctaaatatctatagtataaaatatgaagacagagtagaatggggtaatgcaggagagtgtgacagggcaaggggacctcaacgtgccaggaaagttggtccttggctcccctggaggagccgtcaccaggacactcactcataaagctcacctgtgataatacaattacatgacatttaatgtattaaaatataataaaatcataacaaaataacaaaaataatatggcacagctgcaaacacctcatatatactaacaattttcatccacccaaccacaagaaataaatgctgttacattccctatttcatagatgagaaagctgagccagcaagagaaaaagtgctggtgagacctgggcagggcgttcaatccaggccgcctggctgcagagtgtaggtgccctcagtagagccagtggacctgcgagctgacagcggagactgaaatcccggctgtgcactgccctggtgttctcctgtctgagtcaggtgttgatctgggccttgcagactcatgtgctctggagaaaagagaaaaaatagtaagtgctcccctgggtgcacagtgctgctttttactccctgaggacttctccctcctcagtcagtcccaaatcagattcaccctttctccgagggaagatgacgtctgcacttttttctccctcccatggcacttttcccagcccctgccagtcccctcccatgactccatcaacatcagcccctgccctgtgcccaccacccaccaagcaaggaggaaaagagccccaggaccaaaggacaagacctgggaaaaacccagtgccctcccctcctctcaagcctggccagctctgacagtgggaggactccccaaagagaggctctggccctggctccatgtccttccaggcctgggctgggtcacacgcacagtccttctctccctcagtccccagtcccacctcacctgtagagacacctgcacacaagggcaggccctaaacactgtggttctgccctccacctgcagctcagtgctcctccacttccagccctgagcaggcagctcctaactgggaagcccattaagaatcccatcagcacggcaggcccagcatggaaacatgtagctgctatggggtctgcagctgacctgaccctgggaacccccttgctcaaggaggccctgcctaccctgacccccaggcccatgacctgcacttgggccaagcttgctccagcctggtccactcatccctggaagcacagcttctccccagggctgctgcttggggaggctgaaaggcctttctctcctgttcctagcagggattcctagcagggattccacccaagccactgccctcacagcccataggggatcttcttctccctgtggagtagaaagtttcttgagacccctcagcctgaggctgcctctgcccaccctttgcacttggggattgccactgccacagccaccgtctcccacatggaccgtcctggagagggagctccacatttgagttcctgtttcatttgatatgcattacaacattagtattggtggaaatccttttaagacccagctgaaactacgaacatctttattggacatcagcatttaaagcaggaattttgagaaattagcacataactttctcacccctttcctggccaatgccccagtaacctacaaggcaaccgttcccgcccacggggaaccagaactgacaatccctcttcaggagacaccacaggtgagagcaggagcgaccacagacctgcactgcccctgctgtgggtgcctcctggacagggccctcttgctgcagggcaggggatgaaccatcccatctgcccaggcctgaggggccaactgacagtgcaattaggttcaaggatgagaaatcaccaccccctgccagatacacagaagtggggaaatggcagaaagactcgggtttcccagacactccaggctctcagtgtctcctgcactgtctctgtctttgcagaaacacaaaacttgctgcttgctcttttcccctcccttcaaacaacctgactgtgcgggaaatcatcctgaccatctctcactccaaactcaggtagtgcttattctttcaaaggtattttgtgactgtgcaagcaaatataaatgtatatgtatatgttctttctccctttgcacacaaattttagcaaactatatatgcttttctgtaccttgctgttttcccttaccattgtatcatggagaccatcccatgaagaaatatcaagaactacactatgtctttcttttttttgttcaaaattttcttggcaatccattgtataggtgtgcatttttttaaatagagattaccctttttgaatgcaatgctttttaaccagctccctgctgataggcatttggattatttctttcagagaacaatttgacatcatgtagcatcatttgggaagggtgcagtgaccccactcctacatgcatatcctaggggagctcatgtattcttggaaccagaaagcaatgtcccagcatgttcattgcagcagtgtctttaatagagactatgtagaggtcaatgaagtggggaagagataaattgtagcatattccttccatggaatactatctagcaatgaaaacaaatgaactatttgtgtgaacattgatccatgtcatagaccatgttaacggaaaaagcaagcaaatgcataacaaaatcagcaagaaacaatttataaaaagtctaaaagtaaagccaggcaagggggcctatacccgtaatcctagcatcttgggaggccaaggtgggcagattgcttgaccccagacgttccagacaagtctgggaaacatgataaatccctttctctacaaaaaatacagaaattagccaggcatggtggcgtgaacctctaatcccagctactcaagaggcctagaagggaggaattgcttaagcctggcaggtagaggctgaagtgagttgtgtttgtgccactgcatttcagtccaggtgacaaagtgaaaccatgttaaaaacaaacaaacaaacaaacaaaaacaagagactttttaaaacttagtaagaatataggggcatacagcaaattcaagacacacattcaccaacagttcttgctttgctcagtacagtattgactgaaacacatgcatatcagaactgtggaaaatcagggctatctacatatgtttctgttattttctatgtatactacatacagccaataatattaaaatgtcacaaattgacaaacctggatggcagcttcacaaagatttcttataattctctattttttcttctagctagaactaccttataataaaatttgtgaagtgaatccacagaaattgagcaaaataaaaaggagtcgttgagtgtgaggaaagctgcaaagaagtaaagacaggtggagacatgacaatactgagcatgttagtgaccttcacagtaactgacttcctggaggagtgtgagcttaagccagaatgaagtgatagaccgtgaaagacggatgaaggagtagcagcttctggaggcaaacatggtgtgtggttggctggattgggatatgtggagggactctgaacattctgctttaggtccagcactagagaaagaggactcatctttatttagcaccttccacaatctgtagagaaatctgaaacattgcaaaagaagatatatgaatggccagttcagggaaaaatgcaaagtaaaaccacagtgagaaaccactaagcaaccattagaatggctaaaattaaaatgattaataactataaatgctagcaaggatgtggaacaatctgtactctcctccattgcctataggaatataaaacatccattttgaaaatcaatttcatatcatctaataaagttaaacaagctagtcctctacagctaccatttccactcctaggtatatactcaagagaaatgaagattttgtcaataatccctgcataaaaatgttcatagtttctttatttataatagtaaaaaataagaaataactgccaatttacaaaaatcatgattcaatcatacaatggaatattatcagcaatgaaaatgaaagaactactgatacgtgcaccaacatgggttgatcacataggtattacaacaagcgcaaaaagccagatacaagggaggccatatgggatgagtagatttgtatgaagttttaaaacaggaagaactgtgctatcctgatagccgtcagatcaatggctgctggaggcatggaagctgagttgaagggagaaaaagggatctttgtgtacattgatagtggcaagagtaatatgctgcatttgtcaaaattcattgataaatttgatgaagatctgattattttggtatatgtacattttataagtttaaaaatcttataataaaaatcataatgttgctgataaaaataataattaaaaatattagcaacaaaatccaacagtataccaaaagaataatacaccatgatatgtccatatatggcaaacacagagctaacattatactgaatagggacaagcttatagcctctcctccaagatctcgaagaaggctaagactcccactttcatcacttttattctacacagcactagaagtcctagcaagagcaatcagccaagaggaggaaataaagggcatccaaattggaaaggagaaagccaacttagccttattcgcaaatggcataatcttttacttagaaaaaactaaatattggccgggtgcggtggctcacgcctgtaatcccagcactttgggaggccgaggcaggcgtatcacgaggtcaggagatcgagaccatcctggctaacatggtgaaaccccgtctctactaaaaatacgaaaaaaaaaaattagctggtcgtggtggcgggcgcctgtagtcccagctactcaggaggctgagacgggagaatggcgtgaacccagggggtggagcttgcagtgagccgagatcgcaccactgcactccagcctggatgacagagcgagactccatctcaaaaaaagaaaaaaaagaaaaaactaaatattccaccaaataaatggtgagaactaataagcaaattcagtaaaattacagaatacaaaatcaatgtgcaaactttcagagcatttatatatacaagcaccatataatctgaagaagaaatcaagaaagcaaaactatttacaaatcataaagaggataaaataactaagaatcaatttaccccaggaagtaaaacaaaaactataaggcactgatgaaggaaattgaagagtacacaaaactggaagagccaggcacagtggcacatacctgtaatcctggcactttgggatgatgagacaggagaattgtttgagcctgggagttcaagactagcctgggaaacatagtgagaccttgtctctaagaaaaaaaataaaacacataaattgggagaattaatattgttaaatattaattttaaaaatgagacacataaatttcatgcacataaattgggagaatattgttaaaatgttcatactacccaaagcaatttacagattcaattcaatccctatcaaaataccaatatcattattcacagaaatagaaaaaatcgtgaaattcatatggaatcgtaaaatatcccaaatagccaaagcaatcatgagcaagaagaacaaagctagaggcatcacacttactgaattcaggatacaatataaagttatagtaaccaaatcagcatggtgctagcataaaaacagacacatagactaatggaatacaaaagagaactcacaataaatccatgcattgatagccaactcatttttggtaaaggaactgagaatatacaatggagaaagaacaaaagcaacaatggagaataaatggagctgggaaaatgctaccagatgcagaagaataccactagaaccgtctctcaccatatacagaaatcaactcaaaatggattaaagatttaaatgtaagtcccaaaactataaaactactagaagaatgcttacaggaaacactccagacatgggtctaggcaaagactttatggctaagacctcaaaagcacaggcaacaaaaataaaatagacaagtgggactatattaaactaaatagcttcagcacagcaaatgaaacaatcaacagaatgaagaggcaacctgttgaatagagaaaatatttgctatgtattcatccaacaaggaactaacatctagaatatacaaggaacttaaaaaactcagcagtaaaaatacaaataatccaattaaaaaatggacaaagtgtctgaatagatgtttctcaaaaggagacatacaaatggtcaacaggtatacgaaaaacactcaaccttattaaatatcaggaaaatgcaaatcaaaactataatgaaatatcatcttatcctatttagaatggctactaataggaaataaaaaataatggatagtggtgagcatgtggagaaatgggaactgttgtacactcttgggaaagtaagtacagcaattatggaaatcagtataatgatttctcaaaaaacaaaaaatagaactactattggatccaacaactccactcatgggtatttatataaaggaaaagaaatcaatatatcaaaagactacctgcacccccaggtttattgaagcactattcacagtagcgaagttattaaatcaatgggtgaattcatcaatgggtgaatgaataaatggtggtatatatatatacacaatggaatgcaattcagccataaaaaagaatgaaatcctgtcagttgcagaaacatggatgtaaccaaaggtcattacgttaggtgaaataagccaagcaaggaaagacaaataccacatgttgtcactaatatgtgcgagccaaaaaggttaatcttagggaggtagagagagtagaaagacagttcccagaaactgggaagaatgtaggggtgggaaaatatagagatgcaggttaatggatgcaaatgtccaattatataaagaaaataagttctaatgtttgatagcacagcagactgactaaagttaacaaaaatgtatatttcaaaatagctataagagtggatttggctgggcatggtggctcatgcctgtgatcccagcactttgggaggccgaggagggtggatcacgaggtcaggagatcgagaccatcctggctaacatggtgaaaccccgtctctactaaaaatacaaaaaaaaaaaaaaaaattagccgggcgtggtggtgggtgcctgtagtcccagctactcgggaggctgaggcaggagaatggtgtgaacccgggaggcgaagcttgcagtgagccgagatcgtgtcactgcactccagtctgggtgatggtgtgagactccatctcaaaaaacaaaacaaaacaaaaaagagtgaatttaaaatgttctcaacagaaagaaatgataaatgcttgaggtcatggataccctaaatatcttgactgatacacacattctatgcatgtatcaaaatgtcacatgtatcctataaatatgtacaaatattatgtaccaattttaaaaaatttaaaaaataaacaacacaatatggggcatttaaaaaggtacaaaaattatgagcatgataaaaatttggcaaatattttcctttttattaagatctttttcattccataagtttaaggagaataaagcccataaagcatcagaagaagttgctctcctgaaagagactcttctgctcagttaaaaagacagaaacagaatcactggagtgagtaggactttggataactgcacagcaccatgtcttagtgtctgggattacacagacttagggaggaggcctcaccttccgggaagaactaaactttggttctctttcttgttttttctattgcaagaccaaaattttagaaaaccaagagaaagatttcagccaaagggatgtactgtctattactctcttttattttttagaatatccattgtcaaagacgatccagactgttacaagaggaattgtgttcctacgccaccaaaatccacatgttgaagccctatgttgagaaggcagaagaagtggccatctacaagcaaaggaaagaggcctcagaagagatcaaccctgcagcaccttgaccttgcacttgtggcctctggaactgtgagacaacacatatttattatttaagtcacccagcctttggtactttgttatggcagccctagcaaattaaaacagaaatattaccttttctaccttgtcctatgtatgaacatgagatttttttaggagtatgaattacctgagatttcaaaagatagagtgaggcaattgaaaatagatgatatagggtcatttccaagcctctgagtgtcccctggccaccacagaaaaatgaagatgttcccattccctttcagtttcacacaaagcaaaagttgtagacctaaactgacatagaatcgccaactgcattaatttatttgagataatgagggagctagttttgcccaaatttcacagaaagacgatgaacaagtagtaagctaaagaggcttcttttgcaggggattgcaggtattatatgtttttctcctacttttaagatacattttcctaaaaggttttgtctaggagtaaatgtcatcactttgctttttttcctcccaattgaatcactggttcctccctgcatttcagtaatgttgctagcatggaggtgtttgtccatgattcacagatgattcaaagagcagagagcttctcctgaggtcacacagcacgtaagcggtggaacaatggcaggcacgtgactctctaggcccctagtccagttttctgggttctatgagaattatagcccttggtttctgttacatgtggttctcttttgagccagagaaggaggacgcacagtgagaagaaagtgccggagccccaagtcctggcttagatttactgggctggggcatggagagagaggctgccactgattctcttaactccagcttctattaccagtcactaagctgaaagcaggaaagtttatcttctgcacttggtccatcagaaccaagatggcagaaagccccactatctaccatggaaaagacaagggtccctcttaccttgaaccatgacccagctttctaactacatatgtttttctgcacatgtagctatttttcttctcatcaagctccagtactcacagtgcaaacacaggagatactgagcctgatgctctgatggaagctctgagttgagattttattttatacttaggtgcctctgaatcattagagttttttgcctgactccactctggccccatttcaatcaaggtctatatgctctgggacctctccaggttctcatcagaaatgaaaaaaaaaaaaaaaagccatgtccagctcctgggtcctccctgatagccgtgagaggcagctcctaatgggagagagccttggggtgaccaaggcctcacagacttcattattcctggaccacatggctccagcctcctgatcacaatggatcagtggtcttagattccgctccaatatttgaagttttttgttcttcggcctcagcaaatgctctctggttgagatgaagggaaaagacacagagacgcaaaagctgtgactgcatggaactctgtccaaggtacctcccggtgttctcttacttatgttagccatgtcctcatgaatttagtgaaatgggcatgttgtctctgagtggaagtgaggggacaccactgggcagagctcaatcgaagggtggctggtgtcctctataccatttatctacacatattggggtttttctagcatgaaatgtcccagaggcagccaaacccgaagcttggctcctccaaggaatgagtgtgagtatcatagccctggccaatgagcactgaactctagagagaccaagagaccttctaaatattgggacactttagttctgaatcccagaagttggcttcttgcctgggaggcaggtgtcactgcatctgatccaaaaaagcagccccatagctcaagatgctcttctggatttctgcctcttcctggttcctggccaagcaaatcttcactgctttgctagcccatctataaattcaaccagacttttcaaatatgtattttcctcccatttttccagttgtagtcaatgggagaagtggtccaaatgacctaatcagcaattgctggaaaccaaagtaacagtatacaattctatgtgttaatatcatataccaagagagaaaatgtatagatatcagtagtagccatttaagcactgtaataatatctatctatatcccatgagtataatatatataaataaatgataacaagaaaataatctttatgtgtaatacgtgactatgactctgacagacaaacctgagagcatagtacgacgacacttatcaccttcactcatgagccagatagtgtgaaatgagaagcagagatttgaaatgtgttgcaaaactctctcaaagaaagtagagtaatatttttcgtgagcaaatcaaagcaatctcctcacaaatcacattggacttataatgtgtgggatgtgtctttattaaaatggaggtaatcctaggtatgtggtcttttttacatgaaccgtactgtcactggctcactagctgtcacttcaccaacaatcgttccatttaataaaagggagatccccccatgggccagcatttcccaggtggaggcctcttgcagacataatcttccaacagagaatttccctgggaacctagaaagaagagaagaggctcaagcaaaaaggatgaaagaaatagcaacaacggccgggcatggtagctcacacctgtaatcccagcactttgggaggccgaagagggtggatcacctgaagtcaggagttcaagaccagactgcccaacatggggaaactccctttctactaaaaatacaaaaaattagctgggcgtagtagcgggcgcctgtaatctcagctactctggaggctgaggcaggagaatcgcttgaactcaggaggtggaggttgcagtgagccgagatggtgccactgcactccagcatgggcaacgagagcaaaactccatctaaaaaaaaaaaaaaaaaaaaccaacagcgataatatcatacactgtcatggtgctatgtgttaatctgtgtccttagcactttcaaaatatgaattcatttaattgtcacgatacaactatggggtgtgcctgctaattttccgttttcaggtgatacaataggaaagaaggtcgcctacaagtcgtggtggagctgggcttgcacgcagacaatcctgccccagggccatgctcacatctctgcactatccagaatgtgagggtgggtggagagtccagctcagggagagtgattggagagacagaataataagaagagtgggcagactggatcactctgatggttctggggcttctcttccaggagagaagaagacaaaaattatgtcaccatcaaggaaagtatccaaagtctctggcttaaacctgggcgtctccagctctgggacaggtggctgggcagggaagacaaactaaggcaagggcccagctcggaagagtttcctttcctgagaattctgcaggagtttccctgacctcatggccacctctcatactttgctcttgttttttccccagggccgatgagggcgtcgtatctggtttccagtggggtctaaagacgccatcagagtgagtggagattgggcttcataaagtgggagatctccaggatccttcctggaatccaagattcccagagaagccggatcccgcgtcccggaacccaactcctgctgctctatgagccctgaccttggggagaactgggctagtgaggagaggatcaagatgaactgggctggggaggcaggaggtaaagggcggcctggagagctcagcagctcctcccacggcgcttctgccccggtctagggtctgcagactcctcaggtcatatctccaagtacgccgccccacgccaccctcccgtggtccctgtccctctgtcccctccccagctccccctacaccgtaagaagctcccaggtaagcggctccagggccgggcggtaggcaggagggagcccgggaggctgggtccccgcggggaggcggagagagcgcgtcagggagacagggagcgggcggggtccctctcccgctctcaaggtgccggttcccggggcccaggctcgcactcccgggtacttggaggccaggggagagggaggactgtggcaggtgaggcaaggagctgtctgagccgctcagcagcctccaggagtcagctctctccaggcctgtcttcactccagtgcctggtcctgcccaggcccccactcccactctgctctcaacctggccccagacaggatcccaaacaactcctgttcctaatgtgaaaaatgtttctgccgctttaggcagaacttgctttagagcactggcgcagacttccgcaggtcttgtgtctgaatttcttggcactgtgtcttttctcacttattcttctgcaaggaaggaattatatcactggttggatgagacaattggctcagatgggttcattgagcactcacccactgggcaagtgtccgtcggggccagctctgggccagatgtgcccaaggctttatagctagttggtggaaaggcctggagggttcatattcaagtccacctgacttgaaaactcatattgaccttacttaagtactgattccccctttataatccatgccataaacttcattgtcttattttaagaaattgccacagcagcctttagcaaccaccctcttgaacagctggcagtcatcaacattgaggcaagaccctgcccagcaaaaagattaaaattagctgaagcctcagacgaccgttagcattttttagcaatagagtaattttaaattaaggtatgtacatagttctttcatacataatgctattgtatacttaataggctacagtagagtgtgaatataacttttatatgtactggaaaaacaaaaatttgtgtgacttgtttgttgccatggtctgaaaccaaatctgcagtatctctgaggtacgtctgtagtttccctttccctcttttgaacttgtttcttgtccttgtctggtcctgcaagctgtatgagtttgccttctctggtaggtctggggacattgtatcccttataaccttggttcctggcatatgacactggtaccaagctctgttggactagtgaggctccctacacacctcctgaactagagcaaaagctctgtgcacacaccgtgcatgtgtgagcctgtgaggagacggtgccttcctgcaggctgttctgaaggggtgttctgttgtgactggaggaaatagccatgggcccctgggcagaagtggctcagaatggaatggatggccccagttttgatcatctgggaacaggaagattctcagataaaaacccatgttttagaagacaaaactgcccaagagtggacagcagctaaccagtaagctatctgggatatcactgtacactgggagggaagatggcctctgccatggtgtagggtgcctgacccagacaaggaggccttcctaggggtcagtgcttctgaagcacctttaaatgaggacaaatacctcatgttcatgattagccgacttgtgcccactcagtggaaaaagaacccagaattttgcaaaattttcagagagagggattcccctcttgtctcttagtgctagggttatgcatgactcgtgcttgaattacagtgtgtactcagctgaaagtcttaattattagaatataagaggcccaaactactgctgttacagatatgtaaaactacacagtataagtttaaacaacccacaaccaattaacagtgaagatagattaacaacctttgtaaatttaaaacaagattggcaaccctttagaaaaaaaatgagacttttgcaaaacaatctaaatgatacactaataacaaaccttcatgaaaatgacatttcaaccatctgaatttctgctttaagttataaactccaaaatgaactaactcccaataatttacagtagggagctctaagccacaaataaaggtgtcaggacagacctgagacctggagtgagcacatccctcagggtcataagtcaatcctgtaagacccttcctccctcagacactccatccagtcatcaggaggtcaagaaaagttccccacagcactaagacccaaccacctcactgtcctcacctccatggacagagcccaggtgaaagccacccctgctcctcctcccgcatctcccacaggctcagcaccatcgtcggcctggagtgcacctggactgagctcatcatgctctgtccctgtttgtgtcagtcacactgggtcccccacatactctgcacttgcatccccacaaggctctgcacacctctattctgtctccccgacctccccagccacagaaatcttcccagtgcaccccctggatttctcagtccacatcagcaaaacctcctcagcctctctcaggatgttcctgcatctcgcagctccagcagcaacctgggtttccctgaggacatgaccccctccgaagtcctcccacatgggggagtttccccagggacttgtacccctgggttcagaggtgaggtggggtccttgctcctcattgtggttctcagaactttctgcctccctcctccctaaaacccctaggctgtcatcagattagagccccatttgcctcactgtaaccattccctgtgggccccaggctgttcttctcaatcctgagtcttgtagctcctggttcactgtcaccctctccagcattgctgtctccttgactcttggtgacttcaacatacgcagatgtggtgggctgagtaatggtccccagagatgtccagtcttaatcgttggaacctgtgaacaggttgcattgcgtggcaaaagggatattactcatgtaatgaagattaaggaccttaaaatagggagattctgctggactctctgtgtgggcccaatcaaatcacaagagccattaaaagcagagagcctgccctggttggagtcagattctgcagaggaggaaggcagaggagaagctggagaggggaggtcagaagttccaagcaggaggattgaatgtgccttaggcaccgtgtgtgagtatctgagagaaggctctaggagctaagggtggctcttaacaaggaagtggaaacctcttttctatctgcaaggaagtgaattcaggcaagaacctgaatgagcttggaagtggattcttccccagagtctatggaaaggaatgcagaccttcccgtatgttgatcttagccccatgagactgggtggacttgcaatccacacgactgtgccatgatacataggtgctgtttaaagccatttggtttgtggtaatttttatggcagcaatagacacccacacagcagagaagatgccctcgcttcctggcctctcagatcctggaactcctctcctccatgatcttctcctgtctgcctgaatctcatgcccttgttatcccctaggcctcatcatggctaagaaccccagcccttccatactctctatctcacacttcccactctctgaccatctttccactcatccccttgcaaggtggccacaggctctgaggacacagatactatcattttatcatatgctgtgatgtaatatcagtggaccactcattgcatatgtgcttgctttccacgcttggagtctaccctgtagtacatcaattccaacaatcgttccaccctcctgggattcccaatccagtgatcctgccatctactcactgtccctcaccctgggtgtcctgtcctccctcctcacccattttgaattctatggtaaataatttccatccctcccttccctctcccttgaattgtcacactcacctggcaaaactacacagctggtgggttccacctctgcctatgctgagcctgcccccatgagctgcaggaggctggagagcagcacacagtacgctgactggtctcttaaaatttaggattccaaaccacataggaagtccctaccatggccagcaatcaccctctccctgcatggctcaccctcagcctcctcctggcctgggtgactcttacacactttttctttgtgctcacacatccaacctgccttccccattcttacttcagctgatgaccttgcttcccacttcactgagaaaactgaacacattagaagacaacttcacagattccaccactgtctgctcatgcatttgcagctgcaccacatgtcaggcgttttaccatgtgagggactgttgtgggttaacccttctgctcccagccagagccagaccctcttctggtgccccaattgccatcccttatcatctacttaaaggtgtcagttcatcaattaataccatttttatctttatcgtcaacctttttcctctctccccactggatcattgtggcagtcatgagaatgcacatcccagcccctcatctagaagaagcagaattgatgatggctccagctcttgaagtctgaaatctattgccacatttgctctgagactatgcccacccctggctttttccagccaatgattgaggaaagtagggcagaaactaaggcaggacattcctcttctgaaggctgactgaagctccagggctccctgccacccttactgaacttcccttagcctgcacacggtctaggatgcttccagctgaccttcctgcactctctacatcactgaggctcagagttgctttgtggtccagtggctttcccagcattttctgtctcatgaatttctctcacaagtatttcccctaataaatccttacatgtttactactgtattggggtccgcttctcaggggaccctaactaacacaagtggcatgaagggtgatccatgaaaacaggcaaaaatgggaatttgaaataagcttcccactgcctggcaggccaagaggatgccacccgggttggtggcagacacagaaagtccatggcacaaggtgcagctgagcagctgggggtctcaccagtgctgagctgagaagttgccttggttagggagtgctatggcacatgcagtgatagaatgccctgcataataaggacagggttggaagaaacctacaaagacagtggctttggctagttacttctcagctgcatcgatgctgtgtaaaaagataatgagaatctgtggattgttgacagctatgactggctacatttgacaccctcggcagtgtctcatggacaggtctttatctcctgtagcaaaagggcagatagcaaggaatgttagctctacatcactatgagggccacagtgctccagagatgtttgacactcagccaaggcaggcctgttacaggaaagtcagggctttggtggggaaacctgagattctgcaaactggaacaggattatgcgatgcgtgccctccaggatcttctgggcatgcagaggaggctcacccttctctagtaatggttcccactttcactgctggaagatgctacacaatcctcacccctatgatgccgcgagaatcccactcaggaggtttgcaggaactagccagcacgtccccataggagcccagggactacttctgggattggaatttgagggtgtttgatcaaggaaccagaatttcaggctggatgaatataatcctttggcttgaagacactttctcagggcatggatttatcaaacactccaggactttgataagtggagtaaacccactgctggggtgtatccacatagtctagaaaaaaacatgcccaactctcaacaaggtagacatgtcttagttgccctggaacatgtagaggatggaataacaagctgaggggagtgggcttggtgaaggcctaccaaaaccatgctctacaagagggcccagaggacacaccttccaccagagcctcaggaacttgatggtgagagggacctgcatcactaagaagtgtcagggtattgtcctttgtaggctgggggtgatggtagtaaagatagtcccagagtttcatttctaatatcactggggagagtgtggccctgaagagacaaagaccaagtggtggcagtgacttgcaaaagccagagggcacggttactatggcaacctcggaggagaagccaagaggactcaagctgcagggaatgtggggaagtataatagagggtggtgtcccagggttaggacaggcagctggttgatatctatgataagaaagcaagaattgagaagcaggagggtgaaggtgtttgactcaatacaaaatcatgatcccatcctcaatgcctagacctcagccaagatgcagattcagatctcagtgacagaggaagagtccatatctctaggcggaatactctgcaaccccgtggaagtatatgctgggacaattccctcagtccttcggcaaaggaccatatagccatttactcaggagattgtacactggggaaaggaaacaggcagaactggggggattattgacactgggtgtgaactgacattgatgctcagatgcccacagcactatcatgtctctcatcacagtggggcttatggagctcagggagtaaacctggacacattatggcccacaatggaactactggatccatagacccagccctggttatcttcctataccctgagtgcataattgacactgatgcactgctaagtggagttacccccaccctgggtccctagtctgtggagtaaggactttcattgtgctgaaagccaaagggaaacctctgacactgcccccatcctggccaaatcaaaaatcatagtgtgtcccagggtgggtcttgtgtaagatacttcaagtattgtggggatcacatcaccattacagagctgaaggatgtgggatggtgttggggctgtctattgtctctacgtaatccagcaacctgtccctgaagaagcctgatgaagcctaaagaatgaactagattactccaggtctggccaagtaggagttataattgcagcttttgtgctgtctggatatcactggtagagcagattaataaacccttggacacagagcatgcagctgtggatttggtgactgcatttctttccactccaattagaaagtggatatggagtgattcacattcatgtgggatcctcaaaacattgatttatcatttgtctcagggctattgtaactcccctgacctctatagtatagtcttaagactatactaaacatactggatatccaataggatattaaatcagctcatatcattgacaacttcctgttgacctggctggatgagcagcaggtagaaagtgcactgtagtgcttggcaaaacacgggcactccagaaggtgaagataaaccttacaaagcttccagagtggccactcggccaggtgcagtggctcacgcctgtaatcccagcactttggaaggctgaggtggatggatcacctgaggttgggagttggagactagcctgaccaacacggagaaaccccgtctctactaaaaatacaaaattatccaggcatggtggcccatgctggtaatcccagctacttgggaggctgaggcaggagaatcacttgaacccaggaggcagagattgcagtgagccaagatcgtgccattgcactccagagtgggcaacaagagcaaaattccatctcaaaaagaaaaagatagcgggcattgaagtaaagttttatgggtgaacaatggccaagtgtttaggggaatgcaggtgtgtcccctccaaggtaacagacaaactgtttcatcttgcatcctcaccagaaagaaggaagcacactgcctgatgagcctcttccagttctgacaacaccactttccacatctaggtatgttgctttggcccacactctaggtgacataggaggaggccagcttcaagtagggcccacacagaaaaggaccctgcagcagatccaggccatggtgcgagcagccaccatctctcagaccccctggtgctggtgatgccattggtagggaaagatgcaggatggagctgaaccaagcaccagtgggaaagtcacagtgaaaggcctgggattctggagtaaggtcatgtcattcacagcagagacatatgccacctattagaagcaacttttagtgtcccttgtcctgattagatagaatgcttaaccacgggacaccaagcaactatgtggttcgagtgcctgtgtgacccacagagtcatagattagacaggcccaacagcatccatcatgaggtgaaaatggtccacctgggttgagcttgaatcccatgtttacacccagagaaaatacccaagtctgaagtggcactgaacaaccaaacagacaaatggaagttagccagccttcaccatgggtcagccctggtttggtaggatgagttcatgaatggagcaaccacagtggcaggcatgaggctacgtatggggccaacagcactgactcccccctaccaaggcagatccagctgccgacacctctgaatgtccaactcattagcaattgaggcccatgatgtgccccagtggggcactatttctttaggtgactaactagccactaagtaacaagttgactacatttagctacttccatcctggaagggccagaggttcatcttcacagggataggctcctattccatgggtgttttcatgtcctgctctcagaaactcagccagcacctctccgggtgctgttgacattcctgatctgcaggctaggcggtgctcctagcccattatctgcctgaaggacccacttggctgggaaagtttcagtgtttccatggctgtgggttccactaatcctatcaccatctgcaccatccagaggctgccagccacaaggaatgctggacaggtcttctacaggcaaaactcagtgccagcctggaggaagcactctgagaggtgggtgccatcttttaggacacggtgcattgtttgaatcagagatgtctctagagtgctgtgttctcaataggaagaacatgtgtgtccagggatcaaaagatggaagcaggtttggctccacgtccaatcccttagattcacccaatggggtattttgcacgttttatcttccaacactgggctgtgcagggtacgaggtcctggtttccaaggagggtacccttaaaaggagacaaaagacagcccactgaactacacattatggttgtcacgagagaagttttgatagtttgtgcccagagaccacctggtgaaaagaggattctcctcctctccaggcccaggtaatagatcctcatcttcaggagaaggcatggctactttcacacaatgagggcggaagtgtgtgtggaaaccagagatccacctgggggccttctggtttcccttacctcattgtaagtgtgagcagaatcatccagcaattcagcctgagacagcttgatttccaaggacccagacccgtcagggcagaaggtttgagtaatgctgggtaatctcccaaggccctgctcctgtgctctgacatcctcagtagcattggtgctgaggtcctgcttccaatgggctgttcccaaccagtgacagatcacaccagtgacacgaaagcaggacattcctgggagaccagggactcctctgatggccaactgtagctcaaggactcctccatggccttgcttaactctccttagattgcctgtggtctacggcacatccagtaaaccttgtctccttctgtccatcactggggatcacctttgcatcttgttgcctttcccagggtaacctacctcccttgccatatcacctgacaggtgtgtcccctaataaaatgctataactttaatcccatgatggaacttgctttttggagcatttggactataaaatcattttcatctgcccactagtgatctcttacttattccaatgtgtaaaatctttttgtttattcaacttctacctgcattggctccattttgctggtatttgtattatgcttttgagttcctcaatgtttattgtttaatcactaaatttgggggtagtttgttacacagcaatggataactaatgaagccctcttacatttccattattctatagaagttaactacatctcttttattttctcctattttgataatattagccacacatagggtttctagtttctcaacacctattcttttctttattttagtttcttttctcctttattccttcccttttttttttttttttttttgagatggagtctcactctcttgcccaggctaaagtgcagtggctcaatctcagctcactgcaagctctgcctcctgggttcatgccattctcctgattcagcttcccaagtagctgggactacaggcacctgccaccacgcccagctaatttttttgtatttttagtagagacggggtttcaccatgttagccaggaaagtctctgtctcctgacctcatgatctgcctgcctcagcctcccaaagtgctgggattgcaggcatgagccaccacacctggcctcttccttccgtttctctttccttctaaccctccctccctctctttcttctctatttccattcaacctatcaccttccctccttcttgctccctttccttccccttccccttccttcttttcttctttcactttttcctccattcctccttctttccctcccttcctccattttttcctttttattataaaattttcctaaaatataaaataaccctatgtgattgggctgtaagtaagcattttctgaatctatatgtcaaaagcataatgtcttttatatgagaaacaagtaaacaacaggaagttattaacagaataaaaatgcttgctataattctaccaccaagacggtgacttttaacacaattccttcaactcagtgttttcagaacacatcatcaacatcaagtattacacatttattgtaaaagtttaagtagccacaattactttggaaatcatattatcattatctagtatggttaaagtccatacaatgtatcatgcaaccaacccattcctaatcatccactctgggggctttggggctttcttgcctatgtgcacaggagacatgcacactaatatttatggcaaaaactggaatcggccacatgtacatcaataggaaaccggtgaaattgtggtaaaacgatatgtaagccttcagcgtaaaaatgaatgaatgacagcctcccacaccacagataactcctacacataatgtgtatcatgggaaaatacatgcagtaggaatttgctgtacaggaagcttaaaaaccagcaaaactaactgaggtttgttttggggagatatatatatatatatatatatatatatatatatatatatacttattgcacaaatctttgaaggaatacaaaggaatacgtatcagaagactcaggatggagtctcctgccgagaccagctcggtcaggaagaccctaacccagtggtgctagaggacttaaagacacacacacagaaatatagaggtgtgaagtgggaaatcgggggtctcacagtcttcagagctgagagccccaaacagatatttacccacatatttattaacagcaaaccggtcattagtgttgtttctataggtattaaattaactaaaagtatcccttataggaagcaaagggatgggccgaattaaaggaataggttgggctagttaactgcagcaggaacacactcttaagacacagatcgctcatgctattgtttgtggcttaagaatgcctttaagcggttttccgccctgggcaggccaggtgttcctttccctcattcttgtaaacctgcaaccttccagcttggacattagggccattatgaacatgttacggtgctgcagagattttgtttatggccagtcttggggccagtttatggccagattttgggggacttgctcccaacggtctccttctagggggtgactgggtagcagcccagggtagctttacaggcttgtgttttacaccagtgctgggcaccctcgtagatacttgattataattccttaaacagagttttccaaattaaaatatacctgttttttatagaaatgaaaaagaaaagaatttcaaagttcattgcaaagattcttaacaagaactacttacattggaagaaaaccacagagaattgtaaggagccatgtgacagagaggaccaggatgccatgaaaatggcattggctacaaataggtcatttgatccttggctccctggcatctctctagattttcaatgatacaatgttcaatctgctgtgcaagataatttcatcttccaaagatttgatgttacattttaccacacattaaactgaaataaacttttacagattggaaatgcacatcattgatcaaaataaatgaaacatgaaaagagtagggaggaatacccagtgatggaatagcaaatatgaatggaaaacagaataggactgctaaaaagaaaaaaaaattcagaagcatgtaatagcagcgctatttagaatcatagtggtgtccaaatcacttctatcacatctcattcaataccacaacaaaagatgttaagtttattatagaatgcccatcaaatagccagtttttgaaaaaaacttgtttctcaattagaactaaccatttcgggctacagcatcaagccaaaattattggcatcatgctaataatttttactaaagtaaaataaagttgactgaagtatgagattcacatttttgtaaatgaaaagcaatttgattaggcatttttttctgcacagcaaaagaaactatcatcaatcacagtgaacagacatcctacagaatgggagaaaaattttgcagtctatccatctgacaaaagtctagtattcagaatccacaaagaacttaagcaaatttacatgaaaaaaaaacttcattaaaaagtagacaaagaacttgaacagacacttctaaagaagacatacatgtggccaacaaaaatatgaaaaaaagctcaacatcgctgatcattagagaaatgcaaatcaaaaccacaaatgagataccacctcatgtcagtcagaatggcaattattaaaaagtcaagaaacaacagatgctggcgaggttgcagagaaataggaatgcttttacactgttggtggaaaagtaaatggttaatccattgtggaagacagtgacagtgtggtgattcctcagagatttagaatcagaaataccatttgatccagcaatcgcattacagggtatatacccaaaggaatacaaatcattctattataaagatatgtgcatgtttacattcatggcagcactattcacaatagcaaacacatggaatcaacccaaatgcccatcaatgatgaactggataaagaaaatgtggtacatatacaccatggaatattatgcagccataaaaaggaatgagatcaagtcctttgcagggatatggatgaagctggaagccattatcctcagcaaactcacacaggaacggaaaaccaaacaccacatgttctcatttataattgggaactgagtaatgagaacacatggacacagggagaggaacaacacacactggggcctattggggcagggtggtggtgggaggatcattagcaaaaatagctaatgcatgccagggttaatacctaggtgatgagttgacaggtgcagcaaaccaacatggcacatgtttacctatgtaacaaacctgcacatcctgcacgtgtaccctggaacttaaaaaaaattaaattaaaagacaagcttaaagaaaaagacaagctgaaagagttaatgaaaaataattagataaaagaagtctttgattttcaaaaacctgaaacaatagttataattttgcttttaacatatattcaaaacatttgatactgttcccttccagaggtgcatcttaattccctctcctgagtgtggcttggacttaatgaggcacttctgatatggcctggttctgtgttcccacccaaatctcatcttgaattgttatgcgaattgtaatcgctacctattgggggagggaccacatgggaggtgattggataatgggggcggtgcccccatgctgttctcgtgatactgagggaattctcatgagatctgatggttttataaggggcttttccctgcttcattctgcacttctctctcctgtcatcatgtgaagaaggatgtgtttgcttccacttctgtcatgactgtaagtttcctggggcaggctcctcagccatgcagaactgtgagtcaattaaacctctttcctttataaattacccagtctcaggtatttcttcatagcagtgtgagaatggactaatataacttctaacttatagaataatgctgacataatggtttgtaactctgggtgtagaacctaaaactcactgcggcttccaccttctctctctctgtctctgggatcatgagctctgggggaagccagctgctgtgccacaagcagccctgcaggaaggtccatgtggctgagaactgaggccttccgggaccagacaacaaagaactaggccttttccaacagccatgtgactgatccatgtttcatgtgaatcctcagccccagtgaagccctcagatgatgcagcccttggctgacaattggactgcaaccttgtgagaggcccggagcaagaagcactcagggaaacctctcctggactcctgaccattggaaactgtggcagatgaggaatatttgttgttttaagctaagttttacataatttgttatgcaatagtaaataaataacacattttcacaagagaggatgtattattacacattaaattgcatttgctttaaatgtatcatcatcatcattattatttttgagacatggtctcgctctgtcacccaggctggagtgcagtggcatgatcaccatgcactgcagtgtcgacctcctgggttcaagggacccactgatctcagcctcctgagtagctgggactaccatcatgaactactatgcctggctaattttctaattttttgtatagatgggggttttgcccaggctgatcttgaccttctggagtcaacaaatctgccttcctctgccttccacagtgctaggatggcaggtgtgagccaccatacctggcgtaaattaattataagatattaaacatgtaacttagttttaaaaggtaaggagaatttccatggctgaagaggatgtattttatgaccattcacaatgatcactttacttgaacttcaatttccaactgtgtccgaagtaaacacaaaaggaagatccaacccttgctaggctgattctattatgccctcaacaaccagctcctggtcattcaccatcctccagttattcaatcaactctaatgtaggtgctgctgtgaagggagttagtggatataattaagggtctcaattagttgactttaggctgggtttatcctgcttggactgtcctaatcaggtgagaccttgaaaggactgggttcttcctgagcatagagactcacagtgtgagagggactcagcatgaggggtttcctccagcatgggctttgaaaatgaaagggctgtgggccgggtgcggtgcctcacgcctgtaatcccagcactttgggaggctgaggcgggcggatcatgaggtcaggagatcgagaccatcctggctaacatggtgaaaccctgtctctactaagaatacaaaaaaaaaaaaaaaaaaaaattagccaagtgtagtggcgggtgcctgtagtcccagctgcttgggaggctgagacaggagaatggcgtgaacctgggagccatagctggcagtgagccgagatccggccactgcacccaagcctgggctacagagcaagactccatctccaaaaaataaataaataaaataaaaaatgaaggggctgtgtaggaaagaatgctggtgaggaccaggaatcgagcacagccctccctgttctctacattgacagccagcaaggaacagggacctcagtcttacaactgccagaaactgcattctgccacctctgtataagcctgaaggagtattcaaaatgaaaacacagcttttggaagcccagaagagagattccatccacaattttgcccagatttctgatcaaggaactataagcagataaatgggtgttgtttcgccaggcatggtagtgcacgaatgaattgatgaattgatatgcacactagttacataaaataaaaattttctgaactttttccgtgttttgcactttataattatctgtaatgcaatttaatacactcatatttcattcattcagtcgacaaaaattaatttagtccctacgataaaccagatatcccctcatatgctcacgtgcctgacactccagaagtttctcaagaccgaggtggagacactggagtgttttaagtggagagatgacacactccgactcccaggagcaggaccactgtgaaaagaacagtcacgtaacaggtcatgggacagtgctagtgtcacaactcacaagtgacagtgtggtggggactaaggggacaggagggcctgaaggatgaaaaggacggagagaagggctggagaagcaggaggtgaagaaaaggagcagaggaaagaattcgaaagcagcagaattcttaggtttaaatacattgttttatggattttaatacatccatctacagagcctagcagggtgtccttggcagttggcctttaatacctcatgtgggtctgcctaaaaactaattttttaatgttaatcaggtttaaaaattactaagtgttcctataaaatatacacaacacttagcagtggatacttcctaaaaacaggcagtgcatgagcactagtgaggggcattgtgactacattgaacagttgcaactttgaggtgaataaagcctgtactgactcctggttgcaactacctggttgcaaagtacacagtgtgctactttgtattgaggagatatcctggactcacacagaaactcagagctatggaatgatggcaaatttaaaatatgacaagcgggagtcacaggtacactgcaaaagtgaaacttagaagctttgtgagtcctgttgtaacgcttttgggcacatttatacatcatggggccaaagtcacattttttaccgattagattcctgatcattcaggggttaccaaggttctgctatccaatgtatttaataaacaaataaataaataaactggtctctattctgtctcatgcactcaggcacaacttttcccaataaaaaaaaaaaaaaaaaggaaaacaaaaaacagtttctacacctccattcccagagcaagctcactctctgtcaccaaactccgtgggtggcttttcttctagaagagtccaggtggacagggagtccagttcagggacggagattcctggatgaaaagtgaagggagagggacagggcccatgccgagggtttcttcctggtttctcagacagctcctgggccaagactcagggaaacactgagacagagcgcttggcacaggaggagcggggtcagggcgaagtcccagggccaggcgtggctctcagggtctcaggccccgaaggcggtgtatggattggggaggccccgccttggggattcgccacctccgcagtttctcttcttctcacaacctgcgacgggtcctttttcctggatactcacgaagcgggcacagttctcattcccactaggtgtcgggtttctagagaagccaatcggtgccgccgcggtcccggttctaaagtccccacgcacccaccgggactcagattctccccagacgccgaggatggtgctcatggcgccccgaaccctcctcctgctgctctcaggggccctggccctgacccagacctgggcgcgtgagtgcagggtctgcagggaaatggtcgggaggagcgaggggcccgcccggcgggggcgcaggacccagggagccgcgcagggaggagggtcgggcgggtctcagctcctcctcgctcccaggctcccactccatgaggtatttctacaccaccatgtcccggcccggccgcggggagccccgcttcatctccgtcggctacgtggacgatacgcagttcgtgcggttcgacagcgacgacgcgagtccgagagaggagccgcgggcgccgtggatggagcgggaggggccggagtattgggaccggaacacacagatctgcaaggcccaagcacggactgaacgagagaacctgcggatcgcgctccgctactacaaccagagcgagggcggtgagtgaccccggcccggggcgcaggtcacgacccctccccatcccccacggagggccgggtcgcctcgagtctctgggtccgagatcctccccgaaaccgcgggaccccgagacccttgacctgggagaggcccaggcgcctttacccggtttcattttcagtttaggccaaaatccccgcgggttggtccgggcagggcggggctcgggggaccgggctgaccgcgggggcggggccaggttctcacaccatgcaggtgatgtatggctgcgacgtggggcccgacgggcgcttcctctgcgggtatgaacagcacgcctacgacggcaaggattacatcgctctgaacgaggacctgcgctcctggaccgcggcggacatggcagctcagatcaccaagcgcaagtgggaggcggcccgtcgggcggagcagcggagagtctacctggagggcgagttcgtggagtggctccgcagatacctggagaacgggaaggagacgctgcagcgcgcgggtaccaggggccacagggcgcctcccggatggcctgtagatctccggggctggcctcccacaagaaagggagacaaatgggaccaacactataatatcgccctccctctggtcctgagggagaagaatcctcctgggtttccagagagtgactctgagggtccgccgtgctctctgacacaattaagggatgaaatctctgaggaaatgaagggaagacaatccctggaatactgatgagtggttccctttgacgctggcagcagccttgggccccgtgacttttcctctcaggccttgttctctgcttcacactcaatgtgcctgggggtctgagtccagctcttctgagtccctcagcctccactcaggtcaggaccagaagtcgctgttccctcctcagggactagaattttccacggaataggagattatcccaggtgcctgtgtccaggctgttgtctgggttctgtgctcccttccccaccccaggcgtcctgtccattctcaagatggccacatgcgtgctggtggagtgtcccatgacagatgcaaaatgcctgaattttctgactcttcccgtcagacccccccaagacacatatgacccaccaccccatctctgaccatgaggccaccctgaggtgctgggccctgggcttctaccctgcggagatcacactgacctggcagcgggatggggaggaccagacccacacacggagctcgtggagaccaggcctgcaggggatggaaccttccagaagtgggcggctgtggtggtgccttctggagaggagcagagatacacctgccatgtgcagcatgagggtctgccagagcccctcaccctgagatggggtaaggagggagatgggggtgtcatgtcccttagggaaagccagagcctctctggagagctttagcagggtcagggtccctcaccttccccccttttcccagagccatcttcccagcccaccatccccatcgtgggcatcgttgctggcctggttctacttgtagctgtggtcactggagctgtggtcgctgctgtaatgtggaggaagaagagctcaggtaaggaaggggtgaggagtgtggtctgagatttcttgtctcactgagagttccaagccccaggtagaagtgccctgcctggttactgggaagcaccatccacactcatgggcctacccagcctgggccctgtgtgccagcacttactcttttgtaaagcacctgttacaatgagggacagatttatcaccttgatgactgtggtgatgggacctgatcccagcagtcacaagtcacaggggaaggtccccgaggacagacctcagaagggcggttggtccaggacccacatctgctttcctcatgtttcctgatcccgccctgggtctgcagttgcacatttctggaaacttctctggggtccaagacttggaggttcctctaggaccttatggccctggcttctttctggcatctcacaggacattttcttcccacagatagaaaaggagggagctactctcaggctgcaagtaagtatgaaggaggctgatccctgaaatcctttggatattgtgtttgggagcccatgggggagctcacccaccccacaattcttcctctagccacatctactgtgggatctgaccaggtcctgtttttattctactccaggcggcaacagtgcccagggctctgatgtgtctctcacagcgtgaaaggtgagaccttggggggcctgatgtgtggggggtgttgggggggaacagtggacacagctgtgctatggggttctttgaatttgatgttttgagcatgcgatgggctgccaaagtgtcatccattactgggacagatatgaatttgttcatgaatattttttctatagtgtgagacagctgccttgtgtgggactgagaggcaagatttgttcacaccttccctttgtgacttgaagaaccctgactttctgcaaaggcacctgaatgtgtctgtgttcctgtaggcataatgtgtggaggaggggagaccaacccaccctcatgtccaccatgaccctcttccccacgctgatctgtgttccctccccaatcatctttcctgttccagagaggcggggctgagatgtctccatctttttctcaactttatgtgcactgagctgtaacttcttacttccctcttaaaattagaatctgagtaaacatttactttttcaaattcttgccatgagaggttgatgacttaattaaaggagaagattcctaaaatttgagagacaaaataaatggaacccatgagaaccttccagagtccatgtgtttcttgtgctgatttgttgcaggggaggagaatagatggggctgtgcctagtgggtgctcaggccagtatggactttatgtggtcactgctcagctgggtcatctttgctccttcattctccttggcccttcagtagaaccttgtcccaccaccacctgtgatcacagggacttggatgtcacctacggtggtccctgcatacaaatctcattgtggtatcaagagactaattttcagacctgtccagctcttgccctcctcccagggctctttcctggattgtagttttcatcttgtctccaatctttttaaaggaagcagattctgaaatttgcagagaggaggggtcccatagtttctcatcatagtgaactttctgttggagctcctcttctgctctcctactcttcttcctgccctgagttgtagtaatcctagtgctggctccaatccaaactcatggatttacaaagcagagtctaatttagattcatacgtggttggaaaattgtacccataagcctagggttatctttcctgaagagaaaaatatggttgtgtgctgcagtgtgcaggagggttggtgtgggaggaggtagggagggagggaggacacacaagcactcctggtgagaaaagcactggcggcatcgatgtccacatgagatgatgttgttctttagctgccacaaaacagcatttgccctgaggctaccttaacaaagatattggctttagaatagagaagtgctctacagtgatcattcattcaactgacatttgttgtctgctagggatatgactgcttttgcgtttagaaagcatcattaaggtgaaaacagaaaaatttctggtgttgtggtacatatgttctagatgctagcttgtctaacccgtagctcgcaggctgaatgtggcccaggacagttttgaatgtgaggagtttttgcttttctgtggcggacctgagacctggagtgagtgcacccacctccctcaggatcaggagtgaatgctttaggaaccctcctttgcagtgacctgcaaaagatagagggcacggttactgtgagaacccagagtagcagccaaaggggctcaaccttcatggagttttgggaaaggttagtaaaaggtggtgtcccagcgtcagaacagatgggcagccagcgagggcactgcttcatatctatgatgggaatgcaagaattgaggagcaggagactgagggtgtttgatcaaatacaaagtcatgatcccagtctcaattcctagacttcagccaagcttcagattcagaatctacagtggggcttaaggaggccaggaaataaacctggacacattatggcccactgtgggaccactgggttcataaacccagtcctggttatctccccattctccacatgcataattggccttgatgcactggcaaagggagtcacccccacactacatccctagtctggagagtaagggctatcattgtgctgaagcccaaagggaatcatctaaaacttccctcatcccagccaagccagaagcaatattgtgccccaggtgggacttcaggagggtactgcaggtattgtaggggtggcactgccattagagagctgaaggatggggggtggtgttgggattgcctattatctccatataattcagcagtctgtccctgaagaagcctgataaagaatgaatggaattactccagacttgaccaagtaggagtcctgattgcagctgccatgctggctggatatcactgcttggggagattaataaggcctcaggcacatggcaaacagccatgcatttggtgagtgcattctttcccattccatttagaaaatggatatggaatgattcacattcacatgggatttataatacatttattgatagcttgcctcagggctactttaactcctcaaccttctataaatatcaccttaagagatctggacaaatcagacatctcacagaatactaaatctcttcgtttcattggcaatatcacatagattgggatggatgagtaagaggaggaaagtacgctgaattctttggcaaaacgtgtgcactacagaaggtgaagattaaccttacagagcttcaagagtggccactgcagtgaagtgttatgggtccagtggttaggggcatgcagggctgtcccctccaaagtaaaagacaaacttgcatcttgcatcctcaacagaaggaaggaagcacactatttggtgagcttctctgggtcctggcaacaccacattccacatctaagtatattgtttggcccactgtctgggtataatataggaagaggtcagctttgagtgcggactagacaggaaaggacactgcagcagatccaggcggtggtgtaccaggtcatcaactctcagtcccctggtgctgggggtgacagcgtggggaaagatgctagatggagctgaaccaagcagctgagatcaagtgagctgagatcccgcccctacactccagcctgagcaacaagagtgaaactccatctcaaaaagaaaaaaaaattaaaaggataagcaccctcccacatcagagataactccccaacacataatatacatgcggtgtgagttctctgtatggggaagttaaaaaaatacaggtcaaactgtgatttgggtattattgtaaaaatcttcagtgacaatgccaaggaatagcaaatacaagactcaagacataggttccttttaggggataggattggacaacagcctagggtggcttcataggttctgtttcttatgccaggaggggatatccaggtagttagttacttgatcataaaactttatttatttatttatttatatattttgagtctcgctcttgttgcccaggctggagtacagtggcatgatctcagttcactgcaacctccgcctcccaggttcaagggattctcctgcctcagcctcctgagcagctgggattgcaggcaaatgccaccactcccagctaatttttgtatttttagtagagacgggcttcaccatgttgaccaggttggtctggaactcctgacctcaggtgatccacccacttcagcctaccaaattgctgagattacaggcatgagccaccactcctggcccacaaatctttaaagtggtatttttcaaaatgcaccttgtgtgccattcctgattgattgtttggaaatgaaagagaaaagaaaatgccaaagttcatcacaagcatcctttgcgataactactcgtagtaaaacaaagccgcagctggccgggcacggtggctcacttctgtgatcctagcactttgggaagtcgaggcctgtggatcacgagatcaggagttcgagaccagcctgaccaacatggtgaaacctcgtctttactaaaaatacaaaaattagctgggcgtgttggtgcgtgtctgtaatccaagctactcagaaggctgatgcaggagaatcgcttgaacctggaaggcagaagttgcagtgagctgagatcctgccatcgcactccagcctgggtgacagagccatactccatctcaaaacaaacaaacaaacaaccacaaaaaacaagccacagccaattttaaggagccatgtgagaggaccaggatgccatgaaaaacagccttggctacaaataggtcatttgatccttggctagttggcaactctctacattttctgatacacagtgttcaatctggtaggtaaggcaatagtatcttgcaaagaatttgagaatttgatatgttgctcacattttaccacacatacaagtgaattaaacttttacagaatagaaaaaaagcattgttgagcaaaataaattaaatgaaaagacataaatgaataactagtgatgaaatagcaataagaatggaaaacacgaaagagctgcttttaaagcaacattagaagcacaaaataacagtgtttttcagaatcatactggagtccaaatcacttctaccacatctaattaaaaaccacagtgaaagatgttaaactgatcacaggatgcccactgaatagccagttactgaaaaatcttgttcctagattgaatttaaccatttccacctaccacatcaaaccaaatcattgtcatgatgctaagccagttgtacagacaaagatgtgagactcacatttttctaattgcaaagcaccctgattaggcaaatatttttgtagatgcttgagtcagaaaattgtcattttgggcattctttttttttttttttttttttttgccttcaagcatctgtttaacaaagcacatcttgcaccgcccttaatccatttaaccctgagtggacacagcacatgtttcagagagcacggggttgcgggtaaggttatagattaacagcatcccaaggcagaagaatttttcttagtacagaacaaaatggagtctcctatgtctgcttctttctacacagacacagcaacaatctgatttctctgtcttttccccacatttcccccctttctattcgacaaaaccgccatcgtcatcatggccccttctcaatgagctgttgggtacacctcccagacggggtggcggccgggcagaggggctcctcacttcccagacggggtggccgggcagaggcgccccccacctcctggacgaggtggctggccgggcgggggctgccccccacctccctcctggacggggtggctgccgggcagagacactcctcacttcccagacggggtggctgctgggcggaggggctcctcacctctcagacggggcggccggggagagacgctccttacctcccagacggggtggctgctgggcggaggggctcctcacatcccagacagggcggcggggcagaggcgctccccacatctcagatgatgggcggccgggcagagacgctcctcacttcctagaccggatggcggccgggcagaggctgcgatcttggcactttgggaggccaaggcaggcagctgggaggcagaggttgtagcgagccgagatcacgccactgcactccagcctgggcaacattgagcactgagtgagagagactccgtctgcaatcccggcacctcaggaggccaaggctggcagatcactcccagttaggagctggagaccagcctggccaacacagtgaaaccccgtctccaccaaaaaaatacgaaaaccagtcaggcatggtggtgcgcgcctgcaatcccaggcactctgcagactctaaattattcaacgcctcagacactaactttccaaggaataggagattatcccaggtgcctgtggccaggaggtgtctgggttctgtgctcccttccccaccccagatgtcctatccattctcaggatggtcacatgggtgctgctggagtgtcccatgaggaatgcaaagtgcctcaattttcttactcttcccttcagaatcccagaatacatgtgtgatccactaccccatctcggaccatgaggccgccctgaggtgctgggtcccgggcttctaccatgtggaaatcacagtgacccaactgtgggatggggaggaccaaatttaggacgcagagcttgtggggaccagacctgcagggtatagaaccttccagaagtgggcagctgtgatgctgtcttctagagacaagtagagatacacatgccatgtgcagcaggaggcactgccagagcccctcacactgagatgggctaaggagatgaatgaggggccatgtctcttctcagggaaagcaggagcccttctggaggccttcagcagggtcagggctgaggcctgggggtcaggacccctcacgttcccctcctttcttagggccatcttcccagcccacattcctcatcatgggcatcgttaccgtcctggttgttctaggtgctgtggtcactgctgtgatgtggaagaataagaccccaggtaggaaaggggtgagttccaagatttcttcttccattcgtggatttcaagctccagatggaagttggctcatttcctgcctagttgtgagacaccatctccacacacatttaccctgttcagatgccctgtcaactctcactcttttgtaaagcacctgtgaaattgaaggacaaatttatcaccttgattgtgatcatgggaacctgactcccagcagtcacaagtcaggagaatgttcctgctgaggacagatgtcaaaaggacatttggttcagcttcaacacatcctcttccctcgggttttctgatcctgacctgggtctgcagtcacagttctggaaactcctctaggatctcatggccctgcctcttccctggcctctcacagtttgttttctttcctcatatggaaaaggagtcagctatgctcaggcttcaagtaagtgtggtaggggtgggagagtgattcctgagatccttggaatagtgtagacaggagcccatgggggaggtcaccaccccacaattcctcctttagtcacatcacctgtgggctctgaccagactttgtttttgttccaccccaaacaggaacagtacccagggctctgatgtgtctctcaagtcttgtaaaagtgacaccttagagggcctgaagtgaaggaggagttggggcagatgggacacaactaggctctagagagtctttgatttggaatttttcaatgtgtggtgggctgttcagtgtcaccacttaccatgactgacttgaatttgttcacgactattttctttccaagactgccttgtgagggactgagatgcaagatttgttcatggctccactttgagacttcaagggcctctgttttctctttctgccaaggcatctgaatgtgtctatgtccctggtaacatgtgagaagtggagagaccagcccaccctcatgtccaccatgacccctgatattgtttggatctgtgtccccacccaaatctcatgctcacttgtaatccctaatgttggaggtggtgcttggtgggacgtgattggctcatgaggatggatgattcatgaatggtttagaatcatctctttcatgctgttcttgtgatagttcttggaggcattgtgccacctccctagggatctgtggaactttaaacttgagagtgatgattaagggtatctgatggaagaaatttctcagtagcatagaattcaggatttggtctggctgcctgtaatagcctatgtgcatatgtgtgagcaaagaaatgacctgaaactggaactgatatttaaatggggaaatttaatacccaggaaaattcttagcggagctgcagcaacaggacccctgccaggactactaaatggtagagccactggctatgtgcaacctcagcctggaaaagccataggcattcaattttctcccatgacagcagctatatgggttatgttcagcaaagccataaatgtggagctgcaaatggcattaggagcccagcagttgcaccagccactgtgctctggattcaaaatatagagtcaaaggagattcttttagacctttaagttttaatgtctgccatgatgagtttcaatcttatgaggaaactgcattcatttcttttggcccatttatataccttttggaatggaaatgtacaagaaatgtctcttccactgttttattaatattttagatgcaaataacattttttaaaaaattttacaggctcaaagctataagaatttaccttgcgtctcagatgagactctagaattttgagttgatgctggaacaacctaacacatttgggacaattgggagtagattattatattttgcaatgtgagaagaacatgacctttggctggctagggaggggatgcaatgatataaacatttatcccctgatacctcatgttaaaatctaacgcccactgtgggacttggggcctaatggccaccatttgggtcatggtgaccaatcttttatgaatcgagagatactgccctctctcgggaatgaatgaattgttgctctattattttccaagagagctagttgttaaaaagaccctggcaacttcctactctctgtgttcctctgttaccatgtgatctctgcatataccagctcccctttgtcttctgccatgagtggaagcagcctgaggccctcactaaatgcgcaaacatttccagacatcagaatcttgagccacatgaacctcgtttatataaattagtcagtctcagacatttctttatagcaacacaaaatggaaaaagataaccctcgcatcacaggtatgtgtctctggcagctagccaccgttcttaagatatccaggatccactcagccaagagtcttctcatcagtactctaaagacactcttatcactcaagagagtctaaggtttttaggagaaaccagggacaaagactaaatgtttttgtgataactcagattgcccacttttctttgaccacatatcttttacaggaaaaaggattgtaacagtaaagaggtattggcatattatcagagtctcatccattcattcaaaattaggccagtttatcatcctcttgtatgaatatgtctcccagaatgaaatcactcagctttgctgacaacactcaatcttaccaggttccaaaaacaaggatggtctcagggacatacagcttcactcttttaggcatcccgtataattgacctaagtgacaatatcttctcttgctcacaccacctttgaggagttaagctaatattgaatttttctcattatataaccctttgatttattcacttaccctcagccactattcctccctctgtccctttatatcagttgtttccaggtttgggagtgacattaggtttgtctgctgggctggcctagactgcaggcagcaatagtattctagcatgtcttccctcagtctagtcttgatcatagagggtaggttatataggtaaggaactagtgggggctatcagaccaccaggctatataactctacttactgttaatcctaacttttcagatgaaatgaatacttgagaattcttacataaaggtgtaaaaatatagttatggtttttcgcttagggataattcctgtttctggcacttttatttacatccctattcctggtactatggcataacatatgaaaaaataaatttgaggtgaagtgtagtctttattccagcatcctctccccttcagaagaattgtatgtatcgtcgtaacagcatcgtcctgatccatcaggtaaaagagaggatgctacctagtggagttattcttgcagccccactcatgttgacagcgagcacattcatgaagatataaaagccagtccttcatgtttatattgcccaacaattagattggcagtttttagacaaacaatgtttcaattgaccatttcaattttctatcaaattttcccctgaggaggacatgtccctctgcattgttggccgtttgaggctgtcaagtgtgttttcttgtgtaaagtagtgtgactcggcagtccaaattggtgcaacctcttcttttctggtccttgtatagcccttgaagcattgacatctacccctggttgagcatagcccaatccagagtcagtgattttcctgtcaagatccattggcagctcctttggggttgctggcatcattctggcttgccaggtattatgatcaaagccttcccactagagaatctgtcacatctccatctgctgcctctgtctgttttcttgaccaacagtgaaaaaagagattatgagaaataagataaattaccaaaattgtgaacaaaagagattatcactaatgacccttaggaagttaaaaaacattataagtgaatactctgaaaaacctgaagccaataagttagaccacttagataaaaaggaccaattcgtgcagagatagaaattgccaaaactgacccaaattaactggaaaacctgaagagaactgtgaactaagtcagaaattgaaaaaccttctcaaaaagaaatgccaaagcccagatatcttcactggtgaattctatcaaatattttgaaagctctttcagacaagaagagaggagggaagactttccagcccatttacagaactggcattaccctcatatcaaagtcacagcaagactcacaggaaaagagtgccatacaccagtgtcaccaataaacataaatgaaaacatccttaacaaacattggcagataatacaaagccacataaaaacggattacactccatgaccaatgggattcatcccaggaacatatggttggattaacatttgaaaatcaattcatggaatgcactgtattaatggaaaaaaagacataattatctcaaaagatgcagaagaaacagttgacaaaaatgttaacatcactcatgttcataagtttcaacaaaataggaatggaggagaccttcttcactctgataaagggcatctataaaaaacccacagctaaaatcaaacttaatgaagaaagactgaagactgaatgcttttctcctaagatggggatcaatgcaaggatgtccaatcccaccacttttatttaatattatactggagattgtagccagtgcaataaggcagaaaattaaaaattaaaggcatccagataaaaaggaaaacatacaattctattcacagataacatgaccctgtctgtagaattcacaagcagataaaaactggctagcactaataaatgaatccagaagggcccataggatatcaaatcaatataaaaattaattattaacatatttctctatagaagcaatgaaaatctcaactttcctatcacagtagttaccagaagagcgaaataggaataaatttaggaagacagcagtgtttgttcactgaaaataaaaaaacattcctcagagaaattaaaggtctaaataaatggagagatgcgagttggaaagctcgataatactgttaagatggcaattctcccccagtagatctataggttcaacacaatccctatcaaaatcccagcagggattttatagaaaattgacaaaataggccgggcgcggtggctcatgccggtaatcccagcactttgggaggctgaggcaggcggatcatgaggtcaggagatccagaccatcctggctaacacggtgaaaccccatctctactaaaaatacaaaaaactagccgggcgtggtggtgggctcctcgggaggctgaggcagaaaaatggcatgaacccggtaggcggaggttgcagtgagcggagatcatgccactgcactccagcctgggtgacagagtgagactccgtctcaaaaaaaaaaaaaaaaagaaaaaaagaaaagaaaattgacaaaataatcctaaaaatgtatattaaaatgcagaggatgcagaagggccaacacaaatttgaaaaaaaaaatggaatgtcatatgaaactacaataatccagacagtgtgaaactgagagacatagagatcaatgaacagaagtgagaatctagaaagatattcttactttctttgtcaattgattttcaatgaagttgcataggtaacacaatgttacatttaacaccatataaaatatcagctcaaacaaattagaaacctaaacagctaaaatttatgagttaaaactataaaatttctaaaagaaaacacaggagaaaatttttattactttgggtagttaggcaaaggattcttagataaaataccaaaagcatgatctacaaataaaaaaaaaagagagagagaaattgggcttagttaaaatttaaaacttgagtgctccaaaagacattgagagaatgagaagacaagccatagacagggagaaaatatttcacaatttatcacaaattacatttgtgttgaagaacatgtttccagaataatgtggcaagttcttaaactcaatgtgtaagaagatgagcaactcaactgaaaatgagcaaaacacacaaatatgctcaactgacatttacaaaagcacaaacacaattcaatgaaggaaggagagctttcccaacaaatggtgctggagcaactggacaaccacagtggaaaaaaaataggctgagcccaaacctcacgctttatacaaaaaaaaaaaactcaaaatgaatcacaggctttaatgtaaaacacacagttaaaattacaaacattgagccaggtgtggtgtcacaggcctgtactctcacctactcaggagactgaggtgggaggatcccttgagcccaggagttcaaggccagcctaggcaagatttttttttaaataaataacaaatacattaaaaaattaaaattacaaatcttttaacaaaaagccatcagaactaagactagacaaagagttcttacacataacaccaaaagtatgatctgtaaaagaaaaagttactaaactggatcttatcaaaattaaaactgttgctctgtgagagacctatgaagagcataaaaagacaagctacagaatgagagaagatatttgcaaatcacatattcaataaagacttgcattcacaatatatgaagaaatgtaaaaactcaacagtaaaaatgaaatccaaataaacaataggcaatgagcaagacatgaacagacgtttcactgaagaggataaacaccaggctaacaagcagatgaaaagacactcaacatcactatccagtaggaaaatacaaattaaaactgcagtgatgagaatggctgaaatacaaaataaaggtagcaacagatgctggcaaggttacagagaaactggatcattcatattgctggtaggaatggattttaaaatggtacagccactctggaaatggatattgcagttttcttcaaactgaacatgcaatttaccatatgactagaaattgccctcctaggcacttatttcaaacaagggaaaactttatgttcatgaaaaacctgtatacaaatactcttgcagctttattcataatactcctggaagtaattattcataattacttccataaactggaaataatgcaattgtctttcagtgggtgaaggagatctgctggttgaactcataactgagtctacacaagtgccctttctcaagactactatcctgcttctctttgcatatctcccattttctcacaaagaatattaaagacatgtactcaaggatcaaaatttaatgaacataaatattttactgctccatcaaaggcattcttaaatgggactgcagtttggagccactgccttggttctgctaaggtgctgggtgtgctaccgaccttggcatttgcagcattaatggaaaagtcaacataatgaaacaggcaaatggcatcttggtattactgtgaaaacaggtttccctccaggactctctgaaggcagctcagggggccacactttcaaaatggcagagatcaattatagttcctagtgagacccaacccctagcctattcagattcagcactctctctcgctcttttttttccctcattcttccaacttataattgtatatattttcaaatgtgcaaagaagctgaaagaatagtgcagtaaaattcaagttatcactctgatatatctgattaatatctctttatatgcatgaaagcagcgtgtggaatgatagacaatagagacccagaagggtaagagtggttggcagtgggtgtatcgtagaggagtttcttgttggggtcaatgtatctgtctccagtggtggatgcactgaaggccctgactttaccacaactcaatatagcaatgtagcaaaactgcacctgtgccccatgaatatatacgaatttaaaaatttaaaaataaaataacatctctctttgtagatacaggtagacatgtttgcatagcatgtgtgtgaatgtgtgtgtatgtgtgtgtagagaggcagcaggaatgaagagattaagattttgtgactgagccattctaaagtaacaaacataaaacacgcatggataaatgtctatgtgacaacaaacctgaatataaacatgaaagaacatgtctataaacatatctctggctagataacctatgaaagaattccctaccccagctcccttactggttaccctgcgaacacaggcaggcagggaacaggacccaactaggttccctcatcctcttgcttccaggcaggtcctgcatccactcctgctgcacagagggctcccatctctgccttggtcggtttcacaggtgctcccctaactctctctgccaccactgccttacctgggtggagctgaggctgccttgaccaagaacagcaccacccatctgtgtgccccaagaccaggaagttaggaggaaccacgcaacagagtcaataactatcccacctccccagtcagtctgaactgatggcgggagatgctgatgcttgcttatcctcattccccgtttatttattcttcgttaattcagtccaaactcccctcagtctgaactgatggcgggagatgctgatgcttgcttatactcattccctgtttatttattcttcattaattcaatccaaactcccctcagtctgaactgatggtgggagatgctgatgcttgcttatcctcattccccgtttatttattcttcattaattcaatccaatctccccagcagtcacttcacccaggaagcagactgacctctgctcttcataatcaggaaaccccaaagcactctccatcacctccctgatatcacccttcagctctacatcatcacatgtgggctctaactctgaaggcaggtgtcctcccacagggtcaacccctgaacattggccccagatgtctccccatctcttcccagccctttcagtactgctgtgaatctgtccctcactgagaactggcggggcgatgtgggggaggaggggaaatttcttggtgctgtgtcaaagcatcaagacagacctctccttctctcctgaacctcacactctatctcttcccagacacttgaaataaaacgcagaccagaaatgtctatttaagagtcaacacaatttctttttctagacaagtttctcttattctcagggctcagctatgactgtgggtgaccaaacaactattcacaaaggacagaactcgcttcaatgccagcttatgaatccacaccttgccacctgcagaggtggaaaaaggcacctaaatcctcgatcctatagttcttcctgcccttaactcctcacacacatctggacacttggagagtgtggagggcacccagggtgcagggtggcagtggaggccttgggaaaactggccaggaagccaagatatgcacctcaggtgactaaatttttttactgttctgcacttgctggagaatgaccccaaaagataagatcaatttgttgactaccaacttatttggctgagccatggacatggagcagatgagcattgcctttacctatgacatgcatgaggattctgagacctacctgcagcagttaagccccacacccagagggacacccactctcccacctccttactttctgtatcttttcacactttacatcctcatccttccctctgagagtcttccctctttgggtcttctagtcctatcctaccctctatccccttccaggtggcacagggcttgaccatcacatttgtgtcaggtgacaataatgccaggatcctcagtatgggcagcatcgctttgaggtcagtgatagtgagctgcctgatgagacagacatctcctccacagtgagtgctgatgtcatgaagccctttagttcttcctagttccttaatatgtttgtcttcaatcctgtcatgggcacctgatgcataatggacacttggctgcttcatgcaccctggtctttgatgccgtgttgggatgtttttctgaccgttatgtggggtatctgttttctttcatcatattacatctcttcccccactcccaagtctgtcctctgaacccacacagtacaccagcatctgcatgtgtgccgtgtgctcctgcctcactttttccttttcatgccttattctcaccaggccacattttccccttagttgaacagacacagtaggggactagcccattctggcatgtgaccacgcttcaggaggagactgcaggttgggggtgaaggagactctactgaccccacccctgacatcctcttcccccaccccctggcttctgtcctctgcctcagcaccactcctgaacccccattcctgattgtcagaatttttaacataactaaaaatgaaacacaagtgcatctgcattatgtgtgggtgctctctccctttattttatttggggtgaggttattttagggcatggcccagggtaaattcctgtaaggccttggtgccctgctgtgaggtcaaagagggatgggactaagactgcagagccctggctcccccactacctgccaattgccagccctttgtggggtctcttctgctttctctggcctgggagatgctggggtgtttctgatcctggggctcctgggggtggtgcacattagttccaggcatggagggtgctgtgggcactgctgggaagcttgggtgtcccctcccaggctctctcctcccaggctctctcagtgcctcctcatctgtttctttagcttttggatcttgagcaccagggcctgggcccccaccgactccttcccttccaggagggcctggtccagctccagctgctgtgcaagcaactcctcagcttgggccagctcagctgtgtggggggctcagggccctggtcagagggagtggaggagggagcatcagccagggtagaggggttgaggcccttggaacctgtgttgcaagatctcatggtaagtgaggaattcgacctcgttttctctttttccagcccattagcttaagtccacctgtagtgagaatcccagggagcaacctgtcttgggcataggcctctggagggcagatacagatccctggctcaggggctatatctggatgccttgaatgaggatatggggtcaccggaaagagacaaccagatgtctgtccccactaataaatgattaactgttagatgagggggaattcctgttcaaggactctggactgtgctgctctgggcagagggagggctggagagagggagccctgagggctgggctggggtgggggtggaaggagctgagagttggaaataggcaaaaagctgcagaggtgagggtaatgcagggtgggattgagagaatttcccccgactactgtactgatcccttcatctcctccacccgagcacttggagccacatagcgggtggcctcatcttcccactgtcccagaagctgttctgcccttccatacttgccttggagttttgggagcagcatgtttatgagccctggggtgccagggaccaggagggcaggaggaggtgaagaaaacagcaccgagagagccaggggagtgggaggactgtcgcaggtgaggcaaggagctgtctgagccgctcagcagccttcaggaggctctctccaggcctgtcttcactccagtgcctggccctacccaggcccccactcccgctctgctctcaagctggccccagacaggatcccaaacaactcctgttcctaatgtgaaaaatgtttctgccgctttaggcagaacttgctttagagcactggcacagccttccgccggtcgtgtgtctgattctcttggcactgtgccttttttcacttattcttctgcaaggaaggaattatatcactggttgggtgaggcaactggctcagatgggttcattgagcactcacccgctgggagagtgtctgtcggggccagctatggccaagatgtgtccaaggctctatagctagttggtggaaaggcctggagggttcatattcaggtccacctaacttgaaaacttatattgaccttacttaagtactgattccccctttataatccatgccgcaaacttcattgtcttattttaagaagttgccataagagcctttagcaaccaccctcctgatcagccagcaatcatcaacattgaggcaagaccgtgccccagcaaaaagattaagattagctgaagcctcagatgatccttagcatttttgagcaatagagtaattttaaattaaggtatatacatagttcttttatacataatgctatcatacacttaataggctacagtagagtgtgaatataacttttctatgcactggaaaaacaaaaatttgtgtgacttgtttgttgccatggtctgaaaccaaatctgcagtgtctctgaggtacgtctgtagtttccctttctctcttcctgctggcccggaatgaccttgtttcttgcccctgtctagccctgcatgctgcaagggtttgccttctctggtaggtctgggaactttgcatccttgtaaccttggctcctggcatacgacactggtaccaagctctgttggactagtgagcctcctccccacacacctcctgaactagaaccaaagctctgtgcatgcaccgtgcatgtgtgagccaatgacaagatgttgtcttcctgcaggtgttctgaaggaatgttctgttgtgactggaggacacagccacgggccccccaggcagaagtggctcagaagggagtggatggccccggttttgatcatctggggacaagaaggtcctgagataaaaacccatgttttggaaaacaaaactgcctgagactgaaaagtggctaaccaattcgctatctgggacatcactgcacactgggatggaagatggcttctgccatggtgtagggtcctggacctagacaaagaggccttcctatggctcagtgcttctgaagcacctttaaatgaggccaaagacctcatgttcatgattagctgacttgttcccactcagtggaaaaaaaacccagaacttttgcaaaattttaggagagagggatttccctcttgtctcttagtgctacggttatgcatgactcatacttgaattgcaatgtgtacacagcttaaggacttaactattagaatacaagaggcccaaactactgttgttatagatatgtaaaactatatggtataaggttaaacaacccacaactaattaacagtgaagataaattaactacattgcaaatttaaaacaagattagcagccttttagaaaaaaaaacaaaacacatgggaggttgcaaaggcaatctaaatgatactctaataaaaatccttcatgaaaatgacatttcaaccatctgagtttctgctttaagttatgaactccagaatggactaacacccaataatttacagtagggaggtctaagccacaaagaaaggtgtcagggcagacctgaaacctggaatgaacacgccccctctctcagggtaatgagtaaatcctctaagacccgttctatctcagacagaccatccactcataaggaggtcaaaaacaagttccacacagcactgagacacaaccacctcattgtcctcacctccacggacagagcccaggtgagagccacccctgctcctcctccctcatctcccacagcctcagcaccattgtctgcgccgagtccaccaggactcagctcatcatgtcctttccctgtttgtgtcagtgacactgggtcccccacatactctgcactcacatccccacaaggctctgaacaccactattctgtctccccaacctcctgaaccacagaaatcttcccagtgcaccccctggaatctcagtcaatgatcagcaaaacctccacaccctccctcaggatgttcctgcacctcacagctccagcagcaacctggtctccctgaggacatgaccccctccaaagtcctcccacataggggagtttcccccatggacttgtacccctgggttcagaggtgaggtggggtcctttctcctcactgtggttctcagaactttctgcctccctcctccctaaaacccctaagctgtcatcagattagacccccattcccctcattgtagccattccctgtgggcccctggcctttcctctcaatcctgactcttgtagctcttggttcactgtcaccctctccagcagtctccttgactgttgatgacttcaacatgtggtgggttgagtaatggtcccgaaagaggtccagtcttagtccttggaacctgtgaacaggttgcattacatggtaaaagggactttactcatgtaatgatgattaaggaccttaaaatagggagattctcctggacaatctgtgtggccccaatcaaatcaaatgagccactaaaagcagagaacctgccctggctggagtcagattctgcagaggaggaaggcagaggagacatagaagaggggaggtcagacgttccaagcaggaggattggatgtgccttaggcaccatgtgtgagtagctgaaagaagattctaggagctaagggtggctcttaacaaggaagtggaaacctctgttctatgtgcaagaaagtgaattcagacaagaacctgaatgagcttggaagtggattcttccccagagtccccaggaaggaacacagacctgcccataccttgaccttagccccataagactgtgcggacttgcaacctacaggactgtaacatgataattaggtgctgtttaaagccacttggtttgtggtaatttttatggcagcaatagacacctatacagcagagaagatgcccttgctccctggactctcagatcctggaactcctctcctccatgaccttctcctctctctgcctgaatctcatgcccctgtcatcccctaggcctcatcatgcccaaggaccccagcccttccatactctcaatttcacacttcccactctctggccatctttccactcatcccatgcaaggtggccacaggctctgaggacacagactctatcactttatcatatgctgtgaggtaatatcagtgactactcattgcatatgtgcctgcattccaggcttgaagtccaccctttagcacatcaattccaacaatccttcgacccccaccctgggaataccaatccagtgattctgccatctactcactgtccctcatcgttggtgtcttctctaacttcatgacccaaaccacatggggagcccccaccagggccagcaatcaccctctccctgcatggctcaccctcagcctcctcctggcctaggtgacccttacacaccttctctctgtgctcacacatccaaccctccttccccattcttatctcagctgacaaccttggttcctacctcactgagaaaactgaacacattagaagacagattccatcaccatctgctcatgcatttgcagctgcaacacatgtcaggtgttttaccatgtcggggactgttgtgggtaaaccattctgctcccagccagagccaatccctcttctggtgccccaaacatcatcccttatcatctacttaaaggtgtcagttcatcaattaatacctttttttctctttatcatcaacctttttcctctctccccactggatcattgtggcagtcatgagaatgcacatcccagcccctcagctagagtaagcagaattgatagtggcctcaacttttgaatcctgaaacctattgccacatttgctctgagaccacacctgccccctgtcttttcctgccaatgactgaggaaagcagggcagaaactaaggcaggaacatttcttctctgaaggctgactgaagctctagggcttcctgccacgcttactgaacttctgttagcctgcacagggtctaggatgcttccagctgaccttcctgcactgtttacctcactggggttcagagttgctttgtggtctgatgacattcccagcattttccgtctgtgtcctgaatttctctcataactatttcctccaataaatccttgcacattgaatactgtattggggtctgctcctcaggggaccctaactaacacaagtagtatgaagggtgatccatgaaaacaggcaaaaatgagaatttgaaaaaagcttgcccactgcctggcaggccaagaggatgccaccagggttgtgggagacacagaaattccatagcacaggatgcagctgagctgctatgggtctcacccgtgctgagctgagaggatgccctggttaggggaagctatggcaggtggggtgatagaatgccctgcacaataatgacggggttagggggaaacctacaaagacagtggagttggctggttgctgctcagctgcaatgatgccctatgaaagtatcatgagaatctgcagattgttaacagctgtcactggctacatgtgacagcctctgcagtgtctcatgcagaggtctttatctcttgtagcgaaagggcagataccgtggaatggtagctgaagacatcattatgagggccacagtgctccagagaggtttgccactcagccaaggcaggcctgttacaggaaagtcaggaccctggtggggaaacctgagattctgcaaacaggaacagggttatccgatgggtgccctccaggatcctctgggcatgcataggaggctcacccttctctagtaatggttcccacttcctatgctggaagatgctacagaagtctcacccccatgatacagcaggaatcccactgaagagctttgcaggaactagctggcacgtccccataggaggctgaggagcacttctgggattggaatttgagggtgtttgatcaaggaaccagaatttcaatctggaagaataaaaatcctttggcttggaggcactttctcaaggcatgggtttatcaaacaccccaggactttgataagcggggggccaaacccaccgctggggtgaatccatatagactagaaaaaatgatgcctaactctcaacaaggtagacgtgacttagttgccctggaacttgcacaggatggaataacaaggctgagggaagtgggcatggtgaaggcccaccagtaccatgctccacaagacagtccaaaggaaacaccttccaccagagcctcagaaacgtgatggtgagagggacctgcatcattaagaagtgtcggggtgttgtcctctgcaggctggatgtgatggtagtaaagatgacccagagttacatttattaataaccctggggagagtgtggccctgaagacacaaagaccaaatggtggcagtgacctgaaaaagccagagggcagagttactatggcaaactaaaaggagtagccaataggactcaagctgcagggaatgtggggaaggatagtagagggtgttgtcccaggattaggacaggaagccaacaagggcgctgcttgatatctatgataagaaagcaagaattgagaagcaggagggtgaaggtgtttgacccaatacaaagtcatgatcccatcctcaatgcctagacctcagccaaagttcagattcagatcccagtgacagaggaggagtccatatccctaggaggaataccctgcaaccccgtggaagtaaatgctggcacaattccctcagtccttcagcaaaggaacctatagccatttactcaggagattgtacactggcgaaaggaaagatgcagaactggtcagattattgacactgagtgagagctgacattgatgcccagatgcccacagcactatcatgtctcccatcacagtggggcttacggaggtcagggagtaaacctggacacattacagcccacaatggaactactggttccatagacccagccctggttatcttccaattccctgagtacataattgacactgatgcactgttaagtggagtcacccccacactgggtccctagtctgtggagtcaggactctcattgtgctgaaagccaaagggaaacctctgacgctgcccacatcctggcaaaaaaaaaaaaaaaaaatcatagtgtgtcccagggtgtgtcttgaggaagacactgaaagtaatgtgggagtcacaccaccattagagagctgaaggatgtgggatggtgttggggttgtctattgtctctacataatccagcaacctgtccctgaggaaccctgatgaggactaaagaatgaatgagattactccaggtctggccaagcaggaattataattgcagcttttatgttgtctggatatcactgcagagcagaataataaagcctcgggcacacagcgtgcagctatggatttggtgagtgcatttctttccactccaattagaaaggggatatggagcgattcacatccatgtgggatccacaacacatttatttatagttttttctcagggctattgtaactcccctgccctatatagtatggtctaaagacaatactagacatactggatattctataggatattaaatcagctcatttcactgacaacttcatgttgactgcggtgaatgagcagcaggtagaaagtgcactggagtcattggcaaaacacacgcactccagtatgtgaagataaaccttacagagcttcaagagtggccactgaagtgaagttttatgggttaacaagtgccaagtgtttaggggaatgcaggtgtgttccctccaaggtaaaagacaaactgtttcatcttgcatcctcaccagaaggaaggaagcacactgcctgatgagcctctttgagttctgacaacaccacattccacatctaggtacgtgctttggcaaacactctaggtgatataggaggaggccagcttcaagtagggcctacacaggaaaggaccctgcagcagatccaggccatggtgcgagcagccagcgtccctcagaccccctggggctggtggtgccagtggtggggaaagatgcaggatggagctgaaccaagcaccagtggaagagtcacagtgaagggcctgggattctggagtaagatcgtatcatccacagcagagacatatgccccctgttagaagcaacttttagtgttccttgtcctgatttgatagaaagcttgaccacaggacaccaggcaactatgtggttccaagtgcctttgtgacccacaacatcataaattgcacaagcccaacagcattcatcatgaagtgaaaatggtccacctgggttgagcttgaatcccacgtttacacccacagaaaacacccaagtctgaagtggcactgaacaaccaaacagacaaatggaagttagccagccttcaccatgggtcagcccaggcctggtaggatgagtgcatgaatggagcaaccacagtggcaggcatgagggccagcagcactgacttccccctaccaaggcagatccagctgctgccacctctgaatgtccaactcatcagcattttaggcccatgatatgccctagtggggcactatttctttaggtgactagccattaactaagaagttgactacatttacctacttccatcctggaaggaccagaggttcatcttcacagggttaggtacctattctaggggggtttttctgtcctgctctcagacatagccagtaccattctctggatgctgttgacattcctggtctgcaggctaggttgtgctcctagcccattatctgcctgaaggacccacttggcaagggaaagattcagtgtttccatggctgttccttccactaaccctatcaccagctactctccccaggggctgccagccacaaggaatgccccatatgtagcctcacacctgccactgtggttgttccattcatgtgcccatcctatcatgcatgggctgacccatagtgaaggctggctaacttccatttgtctgtttcgttgtttaatgacacttcagacttggctgttttctgtgggtgtcaacatgggattcaagctcaacccaggtggaccattttcacctcatgatgaatgctgtttggcctgtgcaatctatgactttctgggtcacacaggcacttggaaccacatagttgcttggagtcccgtgatcttccacaggcacaactaagtgccagcctggaggaaacactctgagggttgcatgccatctttcaggacatggtgcgttgtttaaatcagagatgtctctacagttctgtgttcgcaagaggaagaacatgtgggtccagaaatcaaacggtggaagcaagtatggctccatgtctaatgttttagattcacgtaatggggtatttgacatgttttatctcagaacactgggctgtgcagggtacgaggtcctggtttgcaaaggagggtacccttaaaagcagacaaaagacagcccactgaactacacattaagtgtgtcaccagagaagtgtggacagtatatgcccagagaccacctggtgagaagaggagtctcctcctctccaggcccaggtaatagatcctcatccccaggaggaggcatggctactttcacacaataaaggcagaagtgtggaaaccagagatccacctgggggccttctgttttccctcaccccattgcaagtgtgagtagaattatccagcaattcagcctgagaggatttgatttccaagggcccagacccatcagggcagaaggtttgagtcacactcctgggtaatcctccaaggccgtgcccctgtgctctgacatcctcagtggcattggtgctgaggccctgcttcccatggactattcccaaccagtgatgggtcacaccagtgacactaaggcaggacattcctggaagacaggggactcctctgatggccagctgtggctggaggactcctccatggccttgctcaactctccttagattgcctgtggtctaggacatgttaagtaatccttccttccttctttccatcactgggggtcacacttgcatcttattctattgcctttcccagggtaacctacctccctcaccatatcgtctgacaggtgtgtcccctaataaaatgctgtaactttaatcctatgatggcacttgctttttggagcatttggactacaaaatcattttcgtctgcacaccagtgacctcttacttattccaacgtgtaaaatctttttgtttattcaacttcttctacctgcattggctccattttgctggtatttgtattatgtttttgagttcaccaatgtttgttgctgtaagtcactaaatttgggggtagtgttttacacagcaacagataactaatgcagccttcttacatttccgttattctatagaggttaactacgtctattttatttcctcctattttgataatattagccatacagagggtttccagttcccaacgcctattcttttctttattttagtttcttttctcctttgttccttctttttctctttccttctgtccctccttccctctttacttccattctatctctcaccctccttctcccttcctcctttccgtcctttttcttccccttccccttccttcttttcttctttcactccttcctcaattcctccttctttctctcccttcctccattttttcctttttattatgaaattttcctaacatattaaataacccctacgtgattgtgctatcagtaagcattttctgaatctatatgtcaaaagtataataccatggtatataagaaacaagtaaacaacaggaagttattaacagagtctgaataaaaatgcctgctataattctgcagccaagacagtggcttttaactcaattccttcaactaggtgttttcagaacacatgagtttaagttgacacaatcaccttggaaatcatattatcattatctagtatggttaaagtccatacaacatatcgtccaaccctcccactcctaaccatacactctagcgggctttcttgcctatgtgcccaggagacaggcacactgatgtttatggcaaaaactggaatcagccacatatacatcaataggaaatatacatcaataggaaattgtggcataaaatgtaaaccttcagcagtgaaaatgaatgaatgacagcctcccacaccacagataactcctgtacgtaatgtgcatcatgggaaaataaacgcagtaggaatttgctgtacaggaagcttaaaaaccagcaaaagtaaataatttttttttggatatatatatgtacatatatatatatatacttattgtgcaaatctttaaagaaatacaaaggaataaggatcacaagactcaggatggagtctctctctctgggggatgtgactgggcagcagcccaggggagctttacaggtttgtgttttacaccagtgttgggcatctttttagttacatgattgtaatttgttaaacagagttttcaaattaaaatatacctggtatttataaaaatgaaaggaaaagaataccaaagttcattgcaaggatccttaacaagaactacttacattgaaagaaaaccacagagaaatgtaagcagccatgtgacagagaggaccaggatgtgatgaaaatggccttggttaataatagttcatttgatccttagctcactggcatctctctggattttcaagtatacaatgttcaatctgatgtgcaaggtaattccttcttgcaaaggatttggtgttacattttaccacacatacaactgaattaaactttcacagaaatggaaatacacatcactgatcaaaataaatgaaacaagaaaagagtagaaaggaacaaccagtgatggaatagcaaatatgaatggaaagcaaaataagacagctaaaaaaaaaaaaaagaaagcttcagaagcacataatagcagtgctatttagaactgtagtagtgtccaaatcacttctaccacatctcatgcaataccacacccaaaaatgttaagtttacaatagaatgcccctgagccatttttggaaaaaatttgattctcaattcgagttaagcattttgggctactgcatcaaaccaaagttactggcattatgctaagctagatgtgttgactgaagtatgagattcccatttttgtaaatgagaagcaatctgattatgcaattttttctaagtgaaagcaagtttattagagaagtaaagaaacaaaagaatggctactccatagacagagcagtgtgtgtgtatttttttttaagtgtaggcaaatgttttctgaagatgatatgtcaataagaaaattggcacttggggcatacttccactaaatttgagacatcttagacaaaacaaagacttattttcaaggcatgattcttatggcactgaagtcttggaactatttgatctagttactctatgttctcaactgtgttaacttattgaaaaacattgttattaaaggtatttacaagagaaacgcagagatactgttgtttctcctttctctgtctcaaactgttttctctgcagcacccaaggctctgtcatgtctcaaacatttaatcattaatttaaaaagagaagcttatcacagaattagaaaaaaaaatttgaaaattcatatggatccaaaaaagaggttgtgtagccaggagaatgctaagcaaaaagaataaagctggaggcatcaggctatcctacttaaaactatactataaggctaaagtaaccaaaacagcatggtactggtagaaaaacaagcatatagaccaacagaacagaatagaaaactcagaaataagacctcacatctacaaccatgtgatcttcaacaaacctgacaaaaacaagcaatggggaaaggaaacgctatttaataaatggtgctgggaaaactggctagccatatgcagaaaattgaaactggaccccttctttacaccttacacaaaaattaactcaagatggattaaagacttaaatgtaaaacccaaaactagaaaaaccctgaaagaaaatctaggcaataccattcaggacataggcatgggcaaagattttatgatgaaattgccaaaagcaactgccacagaagcaaaaattgacaaatgggatctaattaaacaaaagagcttctgcacaggaaaagaaactatcatcagagcgaaaaggagacaacctacagaatgggagaaaatttatgcaatctatcgatctgacaaaggtctaatattcataatctaaaaagaacttaagcaaatttacatgaaaaaaacaacttcattaagaagtggacaaagcacatgaacagacacttctcaaaagaagacatacaggtggccaaaaaacatattttaaaaagctcaatatcactgatcgttagagaaatgcaaatcaaaaccacaataagataccatctcatgccagtcagaatggcaattattaaaaagttaagaaacaacagattctggcgaggttgtaaagaaataggaatgtttttacactgttggtggaaatgtaaattggttcaaccaatgaggaaggcagtgtggtgattcctcaaagatttagaaccagaaataccatttgacccagcaatcccattgcagggtatatacccaaaggaatataaatcattctattataaagatatgtgcatgtgtttgttcattgcagcacaattcacaacagcaaagacatggaatcaacccaaatgcccaccaatgagggactagataaagaaaatatgatacatatatgccatggaatattatgcagccataaaaaggaatgagatcaaatcctttgcagggatatggatgaagctggaagccattatcctcagcaaactaacacaggaacagaaaaccaaacaccacatgttctcacttataattgtgagctgaacaatgagaacacatggacacagggagaggaacaacacacactgcggcctgttgggggagggcggtggtggggggagcattaggaaaaatggctaatgcatgcaggggttaatacctaggttatgggttgattggtgcagcaaactgccgtggaacccgtttacctgtgtaacaaacctgcacatcctgcatatgtaccctggaacttaacattaaactaaattaaattaaaggacaagattaaaatgttaaggaaaaataattagattaaaagcctttaacttaaaaatcctgaaataatagtttgaattttgcttttaacatatatgcaaatcctttaatactgctcccttccagaggtgcagctgaattccctctcttgagtgtggcttggacttaatgatgcacttctgatatggcctggttctgtgttcccacccaaatcacatcttcaattgtcatgcgaattgtaatccccagtattgaaggagggacctcatgggaggtgattggatcatgctgttctaatgatagtgagtgaattctcatgagatctgatggttttataaggggcttttccccgcttcgctctgcatttctctctcctgccaccatgtgaagaaggacgggttttcttccacttctgccatgattgtaagtttcctggggtggcctcctcagccatgcagaactgggagtcagttaaacctctttcctttataaattacccagtctcaggtatttctttatagcagtgtgagaacagactaatacaacttctgatggagcaatgccgacataacagcttgtgactctgggtgtagaacctaaaactccctgcagcttccaccttctctctctctgtctctgggatcatgagctctggggaaagtcagctgctgtgccatgagcagccctgcagcaaggtccatctggctaagaactgaggccttctgggacccaattacaatgaactaggccttttccaacagccatgtgactgatccatgtttcatgtgaatcctcagccccagtgaagccctcagatgatgcaggcctagactgacaactggactgcaaccttgtgagaggcccttagcaagaagcactcagggaaacttctcctggattcctgacaactggaaactgtgggagatgatcaatatttgttattttgaaatggtacattttacataatttgttatgcaatagtaaataactaatacattttcacaagagaggatgtattattacatgttaatttgcatttgctctaaatttatcatcatcattattattatttttgagacagggtctcactctgtcacccaggctggagtgcagtggcatgatcaccatgcactgcagtgtagacctcctgggctcaagggaccctctgacctcagcctcttgagtagctgggagtacaatcatgaaccactgtgcctggctaattttctaattttttgtagagatgggggtttccccatgttgcccaggctgatcttgaacttctggagtcaacaaatctgccttcctctgccttccacaatgctaggattgcaggtgtgagccaccaaatctggcctaaattaattaaaagatataaatatgtaacttagttttaaaaggtaaggagaattttcatggctgaaaaggatgtattttattaccgttcacaatgattactttacttgaacttcaatttgcaactgtgtcccaagtgaacacaaaaagaagatccagcccttgctaggctgattctatgatggcctcaacaacaagctcctggtcattcaccttccccccattattcaaccaactctaatataggtgctgctgtgaatggatttagcagatataattaagggcctcaattagttgactttaggctgggtttatgctgcttggactgtcctaatcaggtgagtccttgaaaggattgggttcttcctgagcatagagattcacagtgtgagagggattcagcatgaggggtttcctccactgtgggctttgaaaatgaaggggctgtacagggaagaacactggtgggcatcaggaattgagcgcagccctccctgttctctacattgacagccagcaaggaacagggacctcagtcttagaactgcaagaaactgcattctgccacctctgtataagcctgaaggaggattcaaaatgaaaacacagctttgggaagcccggaacagagattccatccacatcatgcccagatttctgactaaggtactataaacagataaatgggtgttgtttggccaggcgtggtaatgcacacctgcaatcctaacatctgaggagctgacacaggaggatcacttgcatccaggaatttgagaccagccaagatcaaacagtgagacactcatctctacaatttctttttaattagctgggcgtggtggcacttgtctgcagtcctatctattctgaagactgaggcaggaagatcccttgagcccaggagtttgaggctgcagtgagccatgatcatgtgactgcacttcaccctggatgacagagggagactctgtctctaaaaacaaataaatcaacaataattgggtgttgtttaaagtcaatgtttgtgataatttgttatgcaatcttataaaattcatacacaggctcaacagactcggaatgaattgatatgcacactagttacataaaataaaatatttcttaatttttcagtgttttacattttataactttctgtgatgcaatttaatacattcatatttcattcattcagtcaacaaaaatttagtgcctaagatgaaccaggtatgccctcatatgctcacgtgcctgacattctagaagcttcacaagaccgaggtggagccactggagtgttttaggtgaggaaatgacacactctgactcacaggagcaggaccactgtggagagaacagtcacgtagcaggtaatgggacaatgctagagccacaatttagaagtgacagggtggtggggactaaggggagaggagggcctgagggatgaaagggacagagggaagggctggagaagcaggaggttaggaaaaggagcagagggaaggaattggaaagcagtagaattcttaggtttaaacacattgttttatagatttttattacatccatctacagagcctcgctcagtgttctttgcagttggcctttaatacctaatgtaggactgcctaaaaactaatgttttttatgttaataaggtttaaaaaacacttagtgttccttctttgcagttggcctttaatactatatttgggactgcctagaaactaattttttttaattaatcaggttttaaaaatactaagtgttcctataagatatacacaccacttagacgtgaatacttcctaaaaacaggcagcacatgagcactgctgaggggcattgtgactgcattgaacacttgcaactgtgaggtgaataaagtctgtactggctcccggttgcaacatatagtaacgcagtgtgctactttatattgaggagatgtcttggactcacccagtaactcagggctgtggaatgaaggtaaatgtaaaaaacaagcgggagtcacagatacattgtctgcgaaagtcaaacttagtagctttgtgagtcctgttgtaatgctttcagacacatttatgtatcaaggggccaaagttacatttttttaccgattagatacctgatcatttaggggttgccaagattctgctacccactgtagttaataaacaaagagaaaacttgtctctatgctgtctcatgtactcaggcacaacttttccggatttaaagaaaaaaaaaacaaaaacctgtctctacgcctccattcccagggcgagctccctctctggcatcgagctccctctctggcggcgagctccctctctggcggcgagctccctctctgtcaccaagctccctggggtgagtttttttctagaagagttcagggaaataggtaaggagtgggaggcagggagtccagttctgggacggggattccgggatgaaaaatgaagagggacggggcccatgacgagggtttctccctggtttctcagacagctcttgggccaagactcagggagacattgagacagagcgcttggcacaggaggagcggggtcagggcgaagtcctatggccccaggcgtggctctcagggtttcaggccccgaaggcgatgtattgattggggaggcccagggttggggattccccatctccgcagtttctcttctccctctcccaacttatgtagggtccttcttcctggacactcaggatgtggactcagttctcacccccatttggtgtcgggtttctagcgaagccaatcggcgtcgctggggtccctgttccagaagtccccgcgaacccattgggactcagattctccccagacgccgaggatggggtcatggcgtcccgaaccctcctcctgctgctcttgggggccctggccctgaccgagacctgggcgggtgagtgcgggatccggagggaaatggcctctgcggggaggaggtaggggcccgcgcactggggcgcaggacccggggagcagcgcaaggaggagggtcggacgggtctcagcccctcctcgcccccaggtacccactccataaggtatttcagcaccgccgtgtcccggccgggtcgcggggagccccggtacatcgcagtgggctacgtggacgacacgcagttcgtgcggttcgacagcgacgcggcgactccgaggatgtagccgcagtcgccgtggttggagcaggagggaccggagtattgggaccggagcacacggaacatcaggcccgcgcacagactgacaagagtgaacctgcccatgccgcgccgctactaccaccagagctaggccggtgaatgaccccggcctggggcgaaggtcacgacccctcctcatcccccacggacgtcccgggtcccccccgcgagtctccggctccaagatccaccccgaggctgcgggacccgccagatcctcgacccgggagaggcccaggcgcctttaccaggtttcattttccgtttaggccaaaatccccgcgggttggtcggggcgggggcggggctcggtgggcggggctgaccgcgggggcggggccagggtctaacaccctccagataatgtatggctgcgacttggggctggaagggcgcctcctccgcgggtatgaacagcacgccaacgatggcaaggattacatagcccggaactaggacctgcgctcctggaccgcggcggacatggcggctcagatcaccaagcgcaagtgggaggcagaagaatttgcagagcagatcagggcctacctggagggcacgtgcgtggagaggctcgcagacacctggagaacgggaaggagacgctgcagctcacgggtaccagggaacacaagacgcctccctgatcgcctgtagatctcctgggctggcttcccacaaagagagaaggaaaatgggaccaacactagaatgtcgtcctctctctggtcctgagggagaggaatcctcctgggtttccagatcctgtacaagagagtgactctgagggtctgccctgctctctgatacaattaagggatgaaatctctgaggaaatgaagggaagacaatccctggaatactgatgaggggttccctttgacaccagcagcagccttgggccccgttacttttcccctcaggccttgttctctgctttacactcaatgtgtgtgggggtctgagtccagctcttctgagtccctcagcctccactcaggtcaggaccagaagtcactgttccctcctcagggactggaattttccacggaattcggagattatcccagatacctgtgtccaggttggtgtctgggttctgtgctcccttccccaccccaggtgtcctgtccattctcaggatggccacatgcgtgctgctggagtgtctcatgagagatgcaaagtgcctgaattttctgacacttcctgttagacctctcccccagacacatatgatccaccattccgtctctgactataaggccaccctgaggtgctgggccctgggcttctaccctgtggagatcacactggcctggcagcaggatggagaggaccagactcgggacatggagcttctagagaccaggcctgcaggggatggaaccttccagaagtgggcagctgtggtggtgccttctggagaggaacagagatacccgtgccatgtgcagcatgaggggttgcccaagcccctcaccctgagatggggtaaggcaggagatgagtggagggggggtcatgtctcttaggaaagcaggagcctctctggagaacttcagcagggtcggtgctgggggctgagggtcagggacgctcaccttccccttttttcccagagcagtcttctcagcccaccatccccatcgtgggtatcgttgctggcctggttctccttggagctgtagtcactggagctgtggtttctgctgtgatgtgcaggaagaagaactcaggtaaggaatggatgaggagtggggtctgagatttcttgtcccactgagggtttcaagccccagttagaagtgtgtcctgcctggttactgggaagcaccatccacactcatgggcctacccagcctgggccctgtgtgccagcacttactcttttgtaaagcacctgtgacaatgaaggacagatttatcaccttgatgattatgatgatggggacctgatcccagcagtcacaagtcacaggggaaggtccctgctgaggacagacctcaggagggcagttggtccaggacccacacctgctttcctcatgtttcctgatcctgtcctagatcagcagttacactttcaggaaacttctctgggatcaaaggctagggggtttgtttagggccgtatggccctgactcctttctggcctctcataggacattttcttcccacagatagagtgagctactctgaagctgcaagtaagtatgaagtgggctgatccctgatccttgggatattgtggtcgggagcccatgggggagctcacccaaccccagattcctcctctagccgcatctcctctgggctctgaccaagtcctgtttttgttctaccccaggcagcgaccatgcgcagggttctgatgtgtctctcacggcttgtaaaggtgagacactgggggacctgatgtgggggggtgttgggggcaatagtggacgcagctgtgctatggggtttctttgaattggatgtattgagcatgtgatgggctgtttaaagtgtcacccctcactgtgacggatatgaatttgttcatgaatattttattttatagtgtgagacagctgccttgtgtgggactgagaggcaagatttgttcacgccttccctttgtgacttcaaaaaccctgactctctttctgcaaaggcacctgaatgtgcctgtgttcctgtaggcataatatgaggaggtggggagaccaacccacccccatgtccaccatgaccctcttccctcatgctgacctgtgttccgtctccaataattaatcattcctgctccatagaggtgaggctgagatgtctccatctctgtctcaactttatgtgcactgagctgtaacttcttacttccctattaaaattagaatctgagtataaatttactttttcaaattcttgccatgagaggttgatgggttaattaaaggagaagattcctaaaatttgagagacaaaataaatggaagacatgagaaccttccagagtccacatgtttcttatgctgatttgttgcatgagaggagagtagatggggctgtgcccagtgggtgctcaggccaccgtgcgctttatgtggtcactgctcagctgggtcatctttgctgctctgttgtccttggctgtatgatccgtccctacggggcttagcgggttttctccccgtgtgcggagatgagagattgtaataaataaaagcacaagacaaagagataaagagaaaacagctgggcccgggggaccactgccatcaagatgcggagaccggtagtggccccgaacagctgggctcgctgatatttattgcatacaagacaaagggcagggtaaggaaggtgaatcttctaaatgattgacaaggtgaagcaagtcacgtgattacaggatagggggcccttcccttttaggtagcatatgtcaccattttcttttctgcacttaagatcaaagactttaagactttcactatttcttctaccgttatctactacaaaattcaaagaggaaccaggagtacaggaggagcatgaaagtggacaaggagcatgaccactgaagcacagcaccacagggaggggtttaggcctctggatgactgcaggtagctctggataatatccagccttctacaagaagctggtggagcagagtgttccccgactcctccaaggaagggagactccctttcatggtctgctaagtaacaggtgccttcctagacactggtgttaccacttgaccaaggagccctcaagtggcccttatgcgggcgtgacagaaggctcatatcttgccttctaggtcacttctcacaatgtcccttcagcacctgaccctatacccgccggttattcctaggttatcttagtaatgcaacaaagagtaatattaaaagctaatgattaataatgtttataataatgattgataattgttcatgatcatctctatatctaatttgtattatgactattcttattctaactattttctttattatactaaaacagtttgtgctttcagtctcttgcctcggcacctgagtaatcctccacccacacttggcccttcagtagaaccttgtcccaccatgacctgtgatcacagggacttggatgtcacctacggcagtccctgcataccagggtccttgtggtatcaagagacaaattttcagatcgttcaagctcttgccgtcttcccagggctctttcctcattgtattttccatcttttctgcaatctttttaaaggaaccagattctgaaatttgccaagaggcagggtcccatagtttctcatcataggtaactttctgttggaactcctcttctgcactcctactcttcttcctgccctgagttgtagtaatcctagtgctggctccaatagaaactcatcaatttataaagcagagtctagtttagattcatatgtggttggaaaattggacccataagcctagggttatctttcctgaagagaaaaatatggttgtgtgctgcagtgtgcagtagagttggtgtggggggagggagggagggagggaggacacacaagcagccctggtgagaaaagatctggtggcactgatgtcagtgtgagatgatgttgttctgtagctgccacaaaaataaagcatttgtcctgaggctacattaataaagatattgcctctagaatagagtggttctctatgatcattccttcaactgacatttgtttctgctaggtatatgactgtttttgcatttagaaagcatcattaaagtaaaaacagaaaaatttcgggccttatggtgtatatgttctagatgcaagcttgtccaacccgcagctcgtgggctgcatgtggcccaggacaattttgaatgtgaggacttttttgcttatctgtggtgcacctgagtcccggagtgagtgcacccacctccctcagggtcaggagtgaatgctttaggaaccctccttttcagtgacctgaaaaagatagagggcacacttactgtgataacccagagtatcagtcaagggggcttgaccttcaaggagttatgggaaagcttaataaagggtggtgtcccagggtcagaaaagatgggcagacagcaagagcactgcttgatatctatgataagcatgtaagaattgaggagccctctccctctccctctccctctccctctccctctccctctgcctctccctctccctctgccacggtctccctctccctctctttccacggtctccctctgatgccgagccgaagctggactgtactgctgccatctcggctcactgcaacctccctgcccgattctcctgcctcagcctgccgagtgcctgcgattgcaggcgcgcgccgccacgcctgactggttttcatatttttttggtggagaaggggtttcgctgtgttggccgggctggtctccagctcctaaccgcgagcgatccgccagcctcggcctcccgaggtgccaggattgcagacggagtctcgttcactcagtgctcaatggtgcccaggctggagtgcagtggcgtgatctcggctcactacaacctccacctcccagccgcctgccttggcctcccaaagtgccaagattgcagcctctgcccggccgccaccctgtctgggatgtgaggagcccctctgcctgactgcccagtctggaaagtgaggagcatctctgcctggccgccatcccatctaggaagtgaggagcgtttctgcccggccgcccatcatctgagatgtggggagtgcctctgccccgccgccccatctgggatgtgaggagcgcctctgcccggccgtgaccccgtctgggaggtgaggagcgtctctgcccggccgccctgtctgagaagtgaggagcccctccgcccggcagccaccccgtctgggaagtgaggagcgtctccgcccggcagccacccactccgggagggagttggggggtcagccccccgcccagccagcctccccgtccgggaggtgaggggcgcctctgcccggccgcccctactgggaagtgaggagcccctctgcccggccagccgccccatccgggagggaggttggggggtcagccccccgcccggccagcctccccgtccgggaggtgaggggcgcctctgcccggccgcccctactgggaagtgaggagcccctctgcccggccagccgccccgtccgggagggaggtggggggggtcagccccccgcctggccagccgctccatccgggagggaggtgggggggtcagccccccgcccagccagccaccccgtccgggaggtgaggggcacctctgcccggctgcccctactgggaagtgaggagcccctctgcccggccaccaccccgtctgggaggtgtacccaacagctcattgagaacgggccatgatgacaatggcggtttagtggaatagaaaggggggaaaggtggggaaaagattgagaaatcggatggttgccctgtctgtgtagaaagaagtagacatgggagacttttcattttgttctgtactaaggaaaattcttctgccttgggatcctgttgatctgtgaccttacccccaaccctgtgctctctgaaacatgtgctgtgtccactcagggttaaatggattaagggcggtgcaagatgtgctttgttaaacagatgcttgaaggcagcatgctcgttaagagtcatcaccactccctaatctcaagtacccagggacacaaacactgcggaaggccgcagggtcctctgcctaggaaaaccagagacctttgttcacttgtttatctgctgaccttccctccactattgtcccatgaccctgccaaatccccctctgtgagaaacacccaagaatgatcaataaaaaaaaaaaaaagaattgaggagcaagcttcacattcagaatccagtggctgaggaagtatccatatccctaagagaaagaaccttgggacaccatgactgttacatgctgggacaattccatcagcccttctgcaaaggagcctatagccatttaatcaggagatgggataagtgttaacattgggtgtgagctaacattgctgcccagattcccacagcaccattatgtccctatcacagtggggcttacagaggccagggaataaacctggacaaattatgccccacggtggaatcactgggtccataaatcctgtcctggttatctccccattctctgtaaaaaggattctctgtaaaaagattacatcgccctaaaccaggacctgagctcttggactgcggcggccatggcggctcagattacccagcgcaagtgggaggcggcccatgaggcggagcagcagacagcctacctggagggcaggtgcgtggagtggctccgcagatacctggagaacaggaaggagacactgcagcacacctgtaccagggaccacgggcgcctccctgatcgcctgtaatctcccgggctggcctcccacaaggatgggagacagatgggaccaacactagaatatcaccctccctctggtcctgagggagaagaatcctcctcagtttccagatcctgtaccagagagtgactctgaggttccacactgctctctgacacaattaagggataaaatctctgaggcaatgacgggaagacgcaattaagggataaaatctctgagggaatgacgggaacacgatccctcatttagtgatcccaagtcactaaatttgggagtagtttgttacacagcaatggataactaatgaagccctcttacatttccattattctctagaggttaactacatctgttttattttctcctattttgataatattagccacacataggtttctagtttctcaacacctattcttttctttattttagtttcttttctcctttgttccatcctttttttttcttttttcttttcttttctttttttttttttttttttttgagacaaagtctcgttctgtcgcccaggctggagtgcagtggctcgatctcggctcactgcaagctctgcctcccaggttcatgccattctcctgcctcagctttccaagtagctgggactacaggcacctgccaccatgcccggctaattttttgtatttttagtagagacagggtttcaccatgttagccaggatggtctctatctcctgacctcgtgatctgcctgcctcagcctcccaaagactgggattacaggcatgagccactgtgcctggcctcttccttccctttctccttccttctagccctccctccatctctttcttctctatttccattcaaactatcgccttccctccttctttctccctttccttcccctccccttccttcttttcttcttttgctttttcctccattcctccttctttctctctcttcctccattttttcctttttattatgaaattttcctaatatataaaataactctatgtgattgggttgtaagtaagcattttctgaatctatatgtcaaaaatataatgtcatgtatatgagaaacaagtaaacaacaggaagttattaacagagtctgaataaaaatgcctgctataattctacagccaagacagtggcttttaactcaattccttcaacacagtgttttcagaacacatcatcaacatcaagtattacacatttattgtaaaagtttaagtagccacaatcactttggaatttgtattatcattatctagtatggttaaagtccatacaacgtatcatccaaccaacccattcctaatcatccactctggggggctttcttgcctatgtgcacaggagacatgcacactaatatttatggcaaaaactggaatcagccacatatacatcaataggaaactagtgaaattgtggtataaccatatgtaagccttcagcagtaaaaatgaatgaatgacagtctcccacaccacagataactcctacacataatgtgcatcatgggaaaataaaggcagtaggaacttgctgtacaggaagcttaaaaaccagcaaaacaaactgatatttgttttggggatatatatatatacacacatacatatatatatgtgtgtgtgtatatatacacatacatatacacatatatacatatatgtgtatatatacacatatatacatatatggatacatatatgtgtatatatacacatatatacatatatggatacatatatgtgtatatatacacatatatacacatatatgtatatatatacacatatatacacatatatgtgtatatatatacttattgcacaaatctttgaagaaatacaaaggaataagtatcacaagactcagcatggagtcttctgctgagaccagctcggtcagggagatcctaacccagcggtgctagaggaattaaagacacacacacagaaatatagaggtgtgaagtgggaaatcaggggtctcacagccttcagagctgagccccaaacagagatttacccacatatttattacagtcattagcattgtttctataaatattaaattagttaaaatatcccttatgggaaacgaagggatgggccgaattaaaggaataggttgggctagttaactgcagcaggaacatgcccttaagacacagatcactcatgctattgtttgtggcttaagaatgcctttaagtggttttccaccctgggcgggccaggtgtcccttgccctcattcccgtaaacccacaaccttccagcttgggtgctagggccattatgaacatgttatggtgctgcagaaattttgtttatggccagtctcggggccagtttatgaccagattttgggggacttgctcccaacagtctccttctggaggatgactgggtagcagcccagggtagttttacagttttgtgttttacaccagtgctgggccccctggtagttacttgattataattccttaaacagagttttccaaattaaaatatacctgttttttatagaaatgaaaaagaaaagaatttcaaagttcattgcaaagattcttaacaagaactacttacattggaagaaaaccacagagaattgtaaggagctatgtgacagagaggaccaggatgccatgaaaacggccttggctacatataggtcattcgatccttggctcactggcatctctctagattttcaataatacaatgttcaatatgctatgcaaggtaatttcatcttgcaaagattctacgttacattttaccacacatacaactgaattaaacttttacagaattggaaatgcacatcactgatcaaaataaatgaaacatgaaaagagtaggaaggaatacccagtgatggaatagcaaatatgaatggaaacagaataggactgctaaaaagaaaaaaaattcagaagcacataatagcagtgctatttagaatcatagtggtgtccaaatcacttctatcacatctcattcaataccacaacaaaagatgttaagtgtgttatagaatgcccattggatagccagtttttgaaaataacttgtctctcaattcaagctaaccatttcgggctacagcatcaagccaaagttattggcatcatgctaagctagatgtgttaactgaagtatgagattctcatttttgtaaatgaaaagcaatcagattaggcaatttttttctgcacagcaaaagaaactatcatcaatcagagtgaacagacatgctacagaatgggagaaaaattttgccatctgttcatctgacaaaagtctagtattcagaatccacaaagaacttaagcaaatttacatgaaaaaaaacttcattaaaaagtggacaaagaacatgaacagacacttctaaagaagacatacatgtggccaacaaaaatatgaaaaagaaagctcccatcactgatcattagagaaatgcaaatcaaaacgacaaatgagataccattttatgccagtcagaatggcaattattaaatagtcaagaaacaacagatgctggcaaggttgcggagaaataggaatgcttttacactgttggtggaaaagtaaatggttaatccattgtggaagacagtgacagtgtggcgattcctcaaagatttagaaccagaaataccatttgacccagcaatcccattgcagggtatatacccaaaggaatataaatcattctattataaagacatatgcatgtttacattcatggcagcactattcacaatagcaaagacatggaatcaacccaaatgcccatcaatgatggtctggataaagaaaatatggtacatatacaccatggaatattatgcagccataaaaaggaaggagatcaagtcctttgcagggatatggatgaagctggaagccattatcctcagcaaactcacacaggaacagaaaaccaaacaccacatgttctcatatataactgggaactgagcaatgagaacacatggacacagggagaggaacaacacacactggggcctgttgggggagggtggtgatgggaggatcattagcaaaaatagctaatgcatgccagggttaatacctaggtgatgagttgacaggtgcagcaaaccaacatggcacacatttacctatgtaacaaacctgcacatcctacacatgtaccctggaacttaaaaaaaaattaaattaaaagacaagcttaaagagttaatgaaaaataattagatacaagaagactttgattttcagaaacctgaaacaatagttataattttgcttttaacatatattcaaatcctttgatactgttcctttctagaggtgcagcttaattccctctcttgagtgtggcttggacttaatgaggcacttctgaaatggcctggttctgtgttcccacccaaatctcatcttgagttgttatgcaaattgtaatccctacctattgggggagggacctcatgggagttgattggatcatggggacggtgcccccatgctgttctcctgatgctgagggaattctcatgagatctgatggttttataaggggcttttccctgcttcattgtgcatttctctctcctgtcaccacatgaagaaggacgggtttgcttccacttctgccatgactgtaagtttcctggggcagcctcctcagtcatgcagaactgtgggtcaattaaacctctttcctttataaattacccagtctcaggtatttctttatagcagtgtgagaatggactaatacaacttctaacttatagaatagtgccaacataacagtttgtgactctgggtgtagaacataaaactaactgcggcttccaccttctctctctctgaatctgggatcatgagctctgggggaagccagccgctgtgccataagcagccctgcaggaaggtccacatgactgagaactgaggccttctgggaacagacaacaaggaaccaggccttttccaacagccatgtgactgatccatgtttcttgtgaattcccagccccagcgaagccctcagatgctgcggcccctggctgacaactggagtgcaaccttgtgagaggccctgagcaggaagcactcagggaaacctctcctggattcctgacgattggaaactgtgggagatgagaaacatttgttgtttcgagctaagttttacgtaatttgttatgcaacagtaaataatatattttcacaagagaggatgtattattacacatcaaattgcatttgctctaaatgtgtcatcatcatcattattatttttgagacagggtcttgctctgtcacccaggctggaatgcagtggcatgatcaccatgcactgcagtgtcgaacgcctggggtcaagggactctctgacctcagcctcctgagtagctgcgactaccatcatgaactaccatgcctggctaattttctaattttttgtatagatggaggttttgcccaggctgatcttgaacttctggagtcaacaaatctccattcctctgccttccacagtgctaggatgacagatgtgagccaccacacctggcctaaattaattataagatattaaacatgtaacttagttttaaaaagtaaggacaatttccatggctgaagaggatgtattttatgaccattcacaatgatcacgttacttgaacttcactttccaactgtgtcccaattaaacacaaaaggaagatccaacccttgctaggctgattctatgatggcctcaacaagcagctcctggtcattcaccttcctccagttattcaaccaactctaatgtaggtgctgctgtgaagggatttagcagatataattaagggtctcaattagttgactttatgctgggtttatcctgcttggactgtcctaatcaggtgagtccttgaaaggactgggttcttcatgagcatagagacttacagtgtgaaagggactcagcatgaggggtttcctccaccatgggctttgaaaaggaaggggctatgggccgggcgcggtggctcacgcctgtaatcccgacactttgggaggccgaggcgggcggatcatgaggtcaggaggtcgagacaatcctggctaacaaggtgaaaccctgtctctactaagaaaaaaaaaattagagcatagtggtgggcgcctgtagtcccagctacttgggactgagacaggagaatggtgtgaacccaggaggcggagcttgtagtgagcagagatcattgggccactgtaccccagcctgggctacagagccagactccgtctcaaaaaaaaaaaaaaaaagaaaaattaaggggctgtgtaggaaagaacgctggtgagcaccgggaattgagcccctcccagttctctacattgacagctagccaggaacagggacctcagtcttacaactgcaagaaactgcattctgccacctctgtataaacccgaaggaggattcaaaatgaaaacacagcttttggaagcccagaatggagattctatccacatcttgcccagatttctgaccaaggaactataagcagataaatgtgtgttgttttgccaggcatggtagtgtgcgaatgaattgatgaattgatatacacactagttgcataaaataaaatctttctgaactttttcagtgttttacagtttataattatctgtgatgcaatttaatacactcatatttcattcattaagtcaacaaaaattaacttagtccctacaatgaacgaggtatcccctcatatgctcaagtgcctgacactccagaagcttcacaagaccgaggtggagacactggagtgttttaagtggagaaatgacacactccgactcacaggagcagggccactgtgaaaagaacagttacgtagcaggtcatgggacagtgctagtgtcacaattcatgagtgacagtgtggtgggaactaaggggagaggagggcctgaaggatgagaaggatggagggaagggctggagaagcaggaggtgaggaaaaggagcagaggaaagaatttgaaagcagcagaattcttaggtttaaagacattgttttatggattttaatacatcaatctacagagcctaggagggtgtccttggcagttgtcttttaatacctcatgtgggtctgcctaaaaactattttttatgttaatcaggtttaaaaattactaagtgttcctataaaatatacacaacacttagaagtggatacttcctaaaaacaggcagtgcatgagcactagtgaggggcattgtgactgccttgaacagttgcaactttgaggtgaataaagcctgtaatggcttctggttgcaacatataggaacacagtggctactttgtattgaggagatgtcgtggactcacacagaaactcagagctaaggaatgatggcaaatttaaagtaagacaagcaggagtcacagatacattgtctgggaaagtgcaacttagtagctttgtgagtcctgttgtaatgcttttggacacatttatacattaaggggccaaagtcacattttttacctattagattcctgatcattcaggggttaccaagattctgctacccactgtagttaataaacaaagagcaaattggtctctattctgtctcatgcactcaggcacaacttttccggattaaaaacaaaaacaacaacaacaaaaatctacacctccattcccagatcaagcttactctctggcaccaaactccatggggtgatttttcttctagaagagtccaggtggacaggtaaggagtgggagtcagggagtccagttcagggacagagataatgggatgaaaagtgaaaggagagggacggggcccatgccgagggtttctcccttgtttctcagacagctcctgggccaagactcagggagacattgagacagagcgcttcgcacaggagcagaggggtcagggcgaagtcccagggccccaggcgtggctctcagagtctcaggccccgaaggcggtgtatggattggggagtcccagccttggggattccccaactccgcagtttcttttctccctctcccaacctacgtagggtccttcatcctggatactcacgacgcggacccagttctcactcccattgggtgtcgggtttccagagaagccaatcagtgtcgtcgcggtcgctgttctaaagcccgcacgcacccaccgggactcagattctccccagacgccgaggatggccgtcatggcgccccgaaccctcctcctgctactctcgggggccctggccctgacccagacctgggcgggtgagtgcggggtcgggagggaaaccgcctctgcggggagaagcaaggggccctcctggcgggggcgcaggaccgggggagccgcgccgggacgagggtcgggcaggtctcagccactgctcgcccccaggctcccactccatgaggtatttcttcacatccgtgtcccggcccggccgcggggagccccgcttcatcgccgtgggctacgtggacgacacgcagttcgtgcggttcgacagcgacgccgcgagccagaggatggagccgcgggcgccgtggatagagcaggaggggccggagtattgggaccaggagacacggaatgtgaaggcccagtcacagactgaccgagtggacctggggaccctgcgcggctactacaaccagagcgaggccggtgagtgaccccggccgggggcgcaggtcaggacccctcatcccccacggacgggccaggtcgcccacagtctccgggtccgagatccaccccgaagccgcgggaccccgagacccttgccccgggagaggcccaggcgcctttacccggtttcattttcagtttaggccaaaaatccccccgggttggtcggggctgggcggggctcgggggactgggctgaccgcggggtcggggccaggttctcacaccatccagataatgtatggctgcgacgtggggtcggacgggcgcttcctccgcgggtaccggcaggacgcctacgacggcaaggattacatcgccctgaacgaggacctgcgctcttggaccgcggcggacatggcggctcagatcaccaagcgcaagtgggaggcggcccatgaggcggagcagttgagagcctacctggatggcacgtgcgtggagtggctccgcagatacctggagaacgggaaggagacgctgcagcgcacgggtaccaggggccacggggcgcctccctgatcgcctgtagatctcccgggctggcctcccacaaggaggggagacaattgggaccaacactagaatatcaccctccctctggtcctgagggagaggaatcctcctgggttccagatcctgtaccagagagtgactctgaggttccgccctgctctctgacacaattaagggataaaatctctgaaggagtgacgggaagacgatccctcgaatactgatgagtggttccctttgacaccggcagcagccttgggcccgtgacttttcctctcaggccttgttctctgcttcacactcaatgtgtgtgggggtctgagtccagcacttctgagtccctcagcctccactcaggtcaggaccagaagtcgctgttcccttctcagggaatagaagattatcccaggtgcctgtgtccaggctggtgtctgggttctgtgctctcttccccatcccgggtgtcctgtccattctcaagatggccacatgcgtgctggtggagtgtcccatgacagatgcaaaatgcctgaattttctgactcttcccgtcagacccccccaagacacatatgacccaccaccccatctctgaccatgaggccaccctgaggtgctgggccctgggcttctaccctgcggagatcacactgacctggcagcgggatggggaggaccagacccaggacacggagctcgtggagaccaggcctgcaggggatggaaccttccagaagtgggcggctgtggtggtgccttctggagaggagcagagatacacctgccatgtgcagcatgagggtctgcccaagcccctcaccctgagatggggtaaggagggagatgggggtgtcatgtctcttagggaaagcaggagcctctctggagacctttagcagggtcagggcccctcaccttcccctcttttcccagagctgtcttcccagcccaccatccccatcgtgggcatcattgctggcctggttctccttggagctgtgatcactggagctgtggtcgctgccgtgatgtggaggaggaagagctcaggtggagaaggggtgaagggtggggtctgagatttcttgtctcactgagggttccaagccccagctagaaatgtgccctgtctcattactgggaagcaccgtccacaatcatgggcctacccagtctgggccctgtgtgccagcacttactcttttgtaaagcacctgttaaaatgaaggacagatttatcaccttgattacggcggtgatgggacctgatcccagcagtcacaagtcacaggggaaggtccctgaggacagacctcaggagggctattggtccaggacccacacctgctttcttcatgtttcctgatcccgccctgggtctgcagtcacacatttctggaaacttctctggggtccaagactaggaggttcctctaggaccttaaggccctggctcctttctggtatctcacaggacattttcttctcacagatagaaaaggagggagttacactcaggctgcaagtaagtatgaaggaggctgatgcctgaggtccttgggatattgtgtttgggagcccatgggggagcccacccacctcacaattcctcctctagccacatcttctgtgggatctgaccaggttctgtttttgttctaccccaggcagtgacagtgcccagggctctgatgtgtccctcacagcttgtaaaggtgagagcttggaggacctaatgtgtgttgggtgttgggcggaacagtggacacagctgtgctatggggtttctttgcattggatgtattgagcatgcgatgggctgtttaaggtgtgacccctcactgtgatggatatgaatttgttcatgaatatttttttctatagtgtgagacagctgccttgtgtgggactgagaggcaagagttgttcctgcccttccctttgtgacttgaagaaccctgactttgtttctgcaaaggcacctgcatgtgtctgtgttcgtgtaggcataatgtgaggaggtggggagaccaccccacccccatgtccaccatgaccctcttcccacgctgacctgtgctccctccccaatcatctttcctgttccagagaggtggggctgaggtgtctccatctctgtctcaacttcatggtgcactgagctgtaacttcttccttccctattaaaattagaaccttagtataaatttactttctcaaattcttgccatgagaggttgatgagttaattaaaggagaagattcctaaaatttgagagacaaaataaatggaagacatgagaaccttccagagtccacgtgtttcttgtgctgatttgttgcaggggaggagagtagatggggctgtgcccagtttctgttctggccaccatgggctttatgtggtcacagctcacctgggtcatctttgctgctccattgtccttggcccttcagtagaaccttgtcccaccaagacctgtgatcacagggagttggatgtcacctagggtggtccctgcatacaaatctccttgtggtatcaagagacaaattttcagacctgtccaggtcttgccttcctcccagggctttttccttaatggtattttcgatttttctccaatctttttaaaggaaccagattgtgacatttgcagagaggaggggtcccatagtttctcatcatggttaactttctgttggaactcctcttctgccctcctactcttcttcctgctctgagttgtagtaatcctagtgctggctccaatccaaactcatagatttataaagcagagtctaatttagattcatatgtggttggaaaattgtacccataaggctagggttattgttcctgaagagaaatatatggttttgtgctgaagtgtgcaggagggttggtgtgggaggagggaggacatacaagcagccctggtgagaaaagcactggcggcatggatgtccacgtgaacttatgttctttagctgccacaaaacagcatttgccctgtggctacattaataaagatatgggctttagaatagggaggtgctctacagtgatcattcattcaactgacatttgttgtctgctagggatatgactgcttttgcatttagaaagcatccttaaagtaaaaacagaaaaatgtctggggttatggtgcatacgttctagatgcaggcttgtccaacccgcggctcgtgggctgcatgtggcccaggacaattttgaatgtgaggacttttttgcttatctgtggtgaacctgagtcctggagtgagtgcacccacctccctcagggtcaggagtgaatgctttaggaaccctccttttcagtgacctgcaaaagatagagggcacatttactgtgataacccagagtatcagccaagggggcttgaccttcaaggagttgtggggaaggttaataaagggtggtgtcccagggtcagaaaagatgggcagacagcaagggcactgcttgatatctatgataagcatgtggaattgaggagcaagcttcagattcagaatccagtgactaaggacatatctatatccctaagagaaagaaccttgggacacgatgatggttatatgctgggacaattccatcagcccttctgcaaaggagcctatagccatttaatcaggagatgggataagtattaacattgggtgtgagctgacattgctgcccagattcctacagcaccattatgtcccccatcacactggggcttacagaggccagggaataaacctagatacattatgccccatggtggaatcaccagttccataaatcctgtcctggttatctccccattctctgagtgcataattggccttgatgcactggcaactggagtcaccccacactgtgtccctagtctggagagtaagggatctcactgtgctgaagcccaaagggaaacatccctcatccaagccaaaccagaagcaatattgtgcctcagggtgggtcttgtggagggtactgcaggtattataggggtggcactgccattacagacctgaacgatgtggggtggtgttgggattgcctgttatctccatataactcagcaatctgtacctgcagaagcctgatatggctaaagaatgaatggaattactccagacttgaccaagtaggagtcctgattgcagctgccatgctggctggatatcactgcctggggagattaataaggcctcaggcacatggcaagcagctgtggatttggtgagtgcattccctcccatttcatttagaagatggatatggaatgattcacattcacatgggatttataatacatttattgatagcttgcatcagggctaccttaactcctcaaccttctataaatatcaccttaagagacctggacgaatcagacatcccacagaatactaaatctcttcatttcattggcaatatcacataaattgggaaggatgaacaacagcaggaaagtacgctgaattccctggcaaaacatgtgcactacagaaggtgaagataaaacttacagagcttcaagagtggccactgcagtgaagtgttatgggtccagtggttaggggcatgcagagctccccgccgccacacacacacacaaagtaaaagacacacttgcatcttgcatcctcaccagaaggaaggatgcacactaccttgtgagcctctctgggttctagcaacaccacattccacatctaagtttattgctttggctgacactctgggtgatataggaggaggccagctttgagtggggcctggactggaaaggacactgcagcagacccaggctgtggtgcagtcagtcaccatccctcagacccctggtgctggaggtggcggtctggggaaagaagcaggatggagctgaaccaagcatcagtgggaaagtcagaatgcagggcctgggatcaggagtaaggccatggagtccacagcagagaaacatgctccatgttagaagcaacttttagcatgttactggccctgataagatagaatgcttgagcataggacaccaagcaaccatgtgattccaagtgcccgtgtgtattggcttctatgtgacccatagagtcattcactggacaggcccagcggcatctatcatgagacgaaaacggtccatgtcggttgagcctcaattccatgttaacacccacagaaaacacccagtcctgatgtggccctgaataaccaaacaaattgaagacaaattgaagttagccagtctgcatcatggatcagcccaggcctgataggaaggacccgtgagtggagcaaccacagtggcagggatgaagctacaaatgagtccagcagcactgtctctccactaccaaggcccacccagctactgcttcctctgaatactctgctcgtgagcattgcagaccaatgataggcaccaatagggcactatttcttaaagtaactgactagcccctaagtgacaagttgaatagcttgagcaccatccatcctggaaggggcagaagtttatcctcacagggataggctcacagggatgcgatgtggtgtggttttcctctctgctctcagaccctcagtcaacaacactattggcattcctgatccactggctcagaatttcagtacactatctgcctgggggacacacctgttggggaaggggatgaagtgtgggccctgaccatgggatcccctggtcgtatcaccacctgcgcctctcaagtgctgccaggcacacagagtcatggacaggactctacaggcacaattcagtaccagcttggatgaaaccctctgaggaatgggtgccatctttcaggatgtgatgcatgtattgaatcaaagacgtctctaaggcactgttttcagaaggaagaatacgcgggtccaaaaaccaagaagtcaaagcaggtgtgtctcattccttatattcacccccagggtgatttacttataagtaaataaatacataacatgaatacttaaataaatttatttatgcatgtatgtatgtatgtatttattttattcattatattcacccccagggtgattttgctcttcttacttccaaaatctggactctgcagggtaggaggtcctggtttcccaaagagggcaccctggcaaggagacaaatgagagtccatggaactacacattgtggttgcacccagggatatttgaatagtatgtgcccagagacaagcaggtgagaagaggaggaggcagcgctgctatcacacaatgagggcaggagaagtgtgtgtggaaaccaggaatccacttggggacgtcctggtttcccttgtccgttgtgtgagcggaatcatccagcaacccagcctgagagggtttgatattcaagagcccagaaccctcaggaaggaaggattgagtgatactcctaggtaatgtcccacgtctctgcttctgtgctctgacatcctcagcaggattagtgcagaagccctgcttccatgagttgttcccagccagtgaccggtcacagcaagcacactaaggcaggccattactgggagacatgggactcctctgatggccaaatgtggctccaggactcctccatgcccttcctcaactctccttagactgcctctgctctaggatgcgtcgaacagaccttgtctccttctgtccagcacttggggtcacacttgcatcattgtctgccgccttttccagggatttctggctcgcgtctcatattcccttacaggtgtgtcccctcataagatgccgtagactttaagctcatcttggcatctgctccttggaggacttggactaaaaagcattgccatgtgcacaccaataactcttacttattccaacctgtaaaatccatctctttaaccaacttctgccacccccataaaatctattttgcgcgcgttcgtagtatctctttgaattaacagatatttgttgtattaagccactaaattttgaggtagtttgtgacacagcagttaataactattaaggctttcttaagtttctgttattccatggatgttatctacatcttttaatttcctgcattttaataatattagccacacttgctgtttctaatcctttcctcctattcttttttgaaaatgttcattttgtctttctctgtccttccatctttctttcctcctttcctccctcagagctttctccctccctccactttttcataaactctatgtggttaggctaaaaagaatcactatttgaatcttatgcttaaagtataatgccataatttacaggataaaagtaaagaaaaggaaggtattaatggaatatgaaaaaatgcctagggtgattctgtagccaagacaatggttttttaacatgtaatctccaccttcaactgaatgttttcagaacacatgagcaacataagttctttcccattcttggtacaagcacttgggaaatcaaattagccttatcttgtatgattaatgtccatacactgtataatcccaccatctgctcctgatcatacactctggggatatctttggctatgtgtcccagagacgtgtacaccaatgtttatggcaaaaaaactggaaacaatcacatatgcatcaatgggaattaacaaaattctgatataattacgaaaagtaaaattttagcagtaaaaatgattgaacagcaccctcccacatcagagataactctcctacacataacatgcatcacagaagaatacatatagtgtgagttctctgtacagcgaagttaaaaaaacaggtcagactgtgatttgggtatatatatttattgtaaaaatctttagagacagtgcaaaggactagtaaatacaagactcaagatagaggttccttttggtggataggattgggcaacagtctagggtggcttcataggttctgtttcttatgccaggagaggatgtccaggtaattagttacttgatcataaatctttatttatttatttattcatttatttttgagatggagtctcactcttgttgcccaagcgggagtgcaatggtgtgatctcgtctcactgcaacctccgcctcccatgttcaagcgattctcctacctcagcctctgagtagctaggattacaggcacctgccatgatgcccggctaatttttgtatttttcgtacagactgtgcttcaccatgttggccaggctggtctccaactcctgatctcaggtgatccacccacttcggcctcccaaaatgctgggattagaagcatgagccaccactcctggcccacaaatatttatagtggcaattttcaaaatgcaccttgtgtgccattcctgattatttggaaatgaaagagaaaagaaaacacaaaagttcattgcaaggatccttagcaataactacatgagttaaaacaaagccacagccaattgtaaggagccatgtgacagagagtaccaggatgccatgaaaaaatagcctttgatagaaataggtcatttgattcttggctaattggcaactctctacattctctggtgtacaatgttcaatctgatgtgcaaggcaattgtatctcgcaaagaatttgagaatttgatatgttgctcaattttaccacggatacaagtgaattaaacttttacagaatagaaaaaaagcactgtcgagcaaaataaattaaatgaaaacacataaaggaataactagtgatgaaatagcaatacgaatggaaaacacgaaagagcttcttttacagcaacattagaagcacaaaataactgtatttttcagaatcatactggagtccaaatcacttctaccacatctaattaaaaaacacagcgaaagatgttaaattgatcaatggatgcacactgaatacccagttattgaaaaatcgtgttcctagattggagttaaccatttccgcctaccacatcaaaccaaatctttgtcgtgatgctaagctagctgtacagacaaagatgtgagacacattttctctaactgcaaagcaccctgattaggcaaatatttttgtagaagcttgagtaagaaaattgacattttgggcattcttaaaaggaattagtagcttctgaggaaaaagaaagatagttatgattgtaaaggcattattatacggcaccagtcgtgggactctttggtctagctactgtattttctcaactttcttgcaactcatcaaagagaacattaatattaaaggcatttgcaaaaaaaatctgagatattgttgtatctccattctctgtctcaaagttttattcattactttacaaaagataattttaaagtattaaagaaaattagtcagatacaagaagtatttgatttacaaaatcctgaaacaataatgttaattgtggtgccagctacttgggaggctgaaggaggagcattgatggcatgagcccaggaggttgaggcttcagtgaatcatgagcatgccactgcattccagccagggcaacagagtgttactttgtctaaaaataactaactagctaactaactaactaaataaataaataatggaggcagtgcacgagccctggtgaagggcactttggctgcattgagcacttgcagatttgaggtgattacattctgtacgttacttaacatgcatactgtacatacttaacatgcatataaattctttgatactcctccttgcagaggtgcagcttcattcccttcctgtgagtgtggcctgaacttaatgactcacttacagactgatagagtaatgttgagataatagtttgtgactctgggtgtagatcataagactcactaagtctgggagcggtcactcacgcctgtaatcccaacactttgggaggtcaagagggcagatcatgaagtcagaagttcgagaccagcctggccaagatggtgaaaccccgtctctactaaaaatacaaaaattagccaggtgtggtggtgcatgcctgtaatcccagttgctcaggaggctgaggcaggagaatcacttgaacctggaagtcggaggttgcagtgagccaagatccagccactgcattccagcctgggtgacagggtgagactctgtctcaaaaaacaaacaaacaaacaaacaaacaaacaaacaaaaaactcactgcagcttcctactttggttctggttttctctttctctgggatcatgagccttgggggaagccagctgctgtgtcataagcaggcctgtggaaagctccaagtgactaggaagtgaggcctcctggggccagacaataagaagatgaagcctcttccaacagccacgtgggatattcttgtgacttgtgaatccccagccccatttgagccctcagatgataaagccctggatgacaattagaccgcaattttgtgagtggccctgagccagaagaactttgagaaaactttcctggattcctgaccactagaaactgtgggacatgataaatatttgttgattttagttgctaagttttaagtgacttgttatgcatcagtagataactaacacaccttcacaagagaggatgaatcattgaatttttcatttgctctaaattgattataagatattaaacatgtcatttgcttttaatatttaacaagaattttcatggttatataagatatattttattatcactaacaatgatcaattttttttaccttcaatttgtatgttctattcaaacacaaaaggaagagccaggctatgctagggtgattctatgatgacaccccaataaccacccttggttgctcacattaccccagttactcggttgacactaatgtaggtgctgctgtgaagggattttgcagatgtattccaggtcccctgtcagttggctttaagatggggattatcctgcttggactgtcctaatcaggtaagctctgaaaaggactgggttcttcctgagaatagagactcacagtgtgagagggattcagtgtgaggggcttcctccattgtgggctttgaaaatggtgggatcatggtgaaagaacactggtggccaataggaagtagaagccctccccactgtctactctgatagcctgaaggaaacagggaccttagtcctacaattaccagaaaccgaattctgccaacgagctctatataagcttgggggagaatcccaatcttaagatgaggatacagctttgcgaaaccctgaacaaagaatctctgacactaggcctggatttctgatgaaggaaatgcagaaaaataaatgagtgctcttttaagccactaagtttgtggtaattggttatgtactaatagaaaattcataaacagattcaacagctaagcatatgacatttcctccaatggaatgaatttatgaactgatatgcatagtagttgcataaaaccaaatgtttcctaacttgctttgcatttttcattttgtgatttttgtgtgatacaatttttaacacaatcatatttcattcactcaagaaaattaacttagtgcctactatgtgccagatatgcttttagatgctgcagacacaactttgatcaaaacaacccaaagcccctgtgcttgtgccttccattttagaggcttcttgagagtgagatggagccattggagtgttttaagtgaagaaatgacacaatctgactcacattagcaggatttctgaccattgttgggagaacagtcatgggcagcaggcgaggggacagagctagggccgcaattcagtagtgacagagtagtagagactaaggggagaggagggcctgatgggtgacagggacagagagaagggctggagaagcaggaggtgaggtaaaggaacagagagaaagaattctaaagcaatggaattctcagacttaaacacagggttttatagatttttaatccatttatcctcagagcctggcacagtgttacttgcaccttggtctttaatacattctgtggggctgtctaataactaattgcctccttatgataaacaggttagaaaagaataccaggtgtcccaataaaatatgcacatagcttagatgtgaataattcctaaatataggcaggtgcatgagatggtcattgtggctcatgcctgtaataccagcattttgggaggctgaggcaggaggatcatttgagctcaggagttcaagactagcgagagcaacatagggagacctcatttctacaaatttttttttagaaaaattagccaggagtggtggtacaagcctgtggtgccagatacttggaggctgaaggaggagcattgatcgcatgagcccaggaggtcgaggcttcagtgagtcatgaacgtgccacagcactccagctagggcaacagagtgatactcggtctaaaaataactaactaactaaataaatgataaataaaggcggtgcatgagcactggtgaagggcactttggctgcattgagcacttgcaaatttgaggtgattaaattctgtacaggctcctggttgcaatatacggtaacacattgtgctttgtattgagatgtcctggactcgcgcacacaaactcagggctataagataaagataatttaaaaatacaacagaccagagtcacagatacacagtctgggaaagtaaaacttaactttgtgagtctaactgcaatgcgtttagacacatttatatataatggggccaaaaatcacctcttttacaaattagattcgtgaccattcaggggctaccaagattgtgctagccactgtactgcgctacccactgttactaagattgtgctactccgctgcgggaccagcggagatcctccacccaataaaagccccaggcgcctataccggattccattttcagttcaggcccaaatccccgggggttggtcgaggctgaggcggggctccgtcgaggctgaggcggggctcagcggcctgggctgaccgcagtcgctgggaatgggtctcacacccttcaatgggtacacagctgcgacgtggactcggactgcagtctcctcagtgggtatgaacataccctatcacggcgccagttacctcgtccgaaaccaggaactgcgctcttggactgcagcggacaaggcggctcagatgccctggcggaggaacaggcagagctgctcaaaacctacctgcagggaaggtgggcggagtggctcagcaaagtccttaagaatgggaaggagaggctgcagtgcccaggtaccagtggccacggggtgcctccctgatctcctgcagatctccttgagtcacattccaaaagaagggaaggaaaatgggaccaacgctaaaatatccctctccctcttgtgaggaggaagagtcctcccgggttttcagatcctatactagagagtgactgagggcctgccctgcactctgggacagttaaaggatgaagtctctgagggaaaggaggggaagacaatccctgaaatactgatccgcggtcccctttgtccccacagcagccttgggcaccaggaattttcctctcaggccttgttctctgcctcacactcaatgtgtatttgtgggtctgattccagcttttttgacctcggcctccgctcaggtcaggaccagaaatctctgttccggcctcagacactaaaactttctaaggaatagaagattgccccaggtgcctgtgtctagactggtgtctgagttgctcccttccccacttcaggtgtcccgtcaattttcaggatggtcccatgaggtggaatgtcccatgaggaatgcaaagtgcctgaattttctgactcttcccctcagaaccccaaagactcacatgacccaccaccccatctctgaccatgaggccaccctgaggtgctgggctctgggcttctaccctgtggagatcacactgacccagtagtgggatggacaggaccaaatgtaggatgcagaggttgtggagaccacacctgcagggtacagaaccttccagaagtgggcagctgtggtggtgtcttctggagaggagcagagatacacatgccatgtgcagcacgatgggctgccagagcccctcaccctgagatgggtaaggaaggggatgaggggtcatgtctcttctcacgggaactaggagcccttctggagcccttcagcaaggtcagggtttgaggcctgatggtcagggcccctcacgttcccctcctttcttacagctgtcttcccagcccaccatccccatcatgggcatcgttactgtcctggttgttcttggtgctgttttcaccagagctgtggtcactgctgtgatgtgaagaataagagcccaggtaggaaaggggtgagctccgagttttcttcttccattggtggattcccagccccagatgggagttggcttgtatcctgcctagtcatgaggcaccatctctgtctatcaacacttactcttttgtaaagaacttgtgaaaatgaaggacaaatttatcaccttcattggagtcatgggaacctgactcccagcagtcacaggtcaggggaaggtacccgcagaggacagacctcactaggacaattagtccagtttcaacacatcctcttacctagggtttcctgattctgacctgggtctgcagtcacagttctggacactcctctgggatctcatgaccctgcttcctccctggcctttcacagtttattttctttccacagatggaaaaggaggcagctatgctcaggcttcatgcaagtgtggtaggggtgggaagagtgatccctgagatccttgtgatagtgtagacaggagcccatgggggagctcaccaccccaaaattcctcctttagtcacatcatctgtgggctctgaccagattttgtttttgttccacccgaaacagggacagtacccagggctctgatgtgtctctcaaggcttgtaaaatgacaacttagggggcctgaagggaaggaggagttggggcataggggacacaactaggctctggagattctttgatttggaatttttcagggtgtggtgggctgttcagtgtcacaacttactatgactgatctgaatttgttcatgactattttttttctaagactgccttgtgagggactgagatgcaagatttgttcatgcctcccctttgtgacttcaagggcctctgtcttctctttctgccaaggtgtctgaatgtgtctacatccctggtatcatgtgagaagtggggagaccagcccaccctcatgtccaccatgacccctgatattgtttggatctgtgtctccacccaaatctcatgttcacttgtaatcactaaggttggaggtggcacctcagggaggtgattggctcatgaggatggatccttcatgaatagtttaggaccatctctttggtgctgttcttgtgatagttctcacaacgtctggtgtttaaaagtgtgtggtacctccctgctctctctccctcctactccaggcttgtaagtcatgcctacttccccttaaccttccagcatgattgaaaatttcctgaggtcctctcataagttgagcagatgccagaatcatactttcatatagcctgcagaaccatgagccaatttaaaccttctgtctttataaattacccagtctcaggtatttctttataacagttgagaatgaataattcagaaaatcggtaccagaagttgggtactgcaataaacgtagctgaaaatgtgaaaatgtctttggaactgggtaacaggtagaggttggaagagtttggagagtttagaagacaagaaaatgggggaaaacttgcaacttcctagaggtttgttaaattgttgtgaccaaaatgctgatagtgatatagacaatagagcccaggctgatgaggtctcagatggagatgaggaacttactgggacctagagaaaaggtcacttttgttatgcattggcaaagaacttggaggcattctgccccctccttagggatctgtggaactttgaacatgagggtgatgattaagggtatctgatagaagaaatttctaagcagcatagcattcaagatttggcttcctgttgtaatagtctatgcacatatgtgtgagcaaaaaaatgatctgaaactggaactgatatttaaaggggaaatttaatatccaggacaattcccagtggagctgcaggagcaggacccctatcaggactactaaatggtggagccactggcaatgtgcaagctcagcttggaaaatccataggtattcaattttcacccatgagagcagctatatgggttatgttcagcaaagccaaggatgtggggctgcaaatggcattgtgagcccaccacttgaaccagtgtgctcaggattcaagatatagggtcaaaggagattattttagagctttaaattttaacatcttccatgatgagtttcagctttgtgaggacactgcattcatttcttttggcccatttattccttttagaatggaaatgtataagaaatgtctcttccactcttgtattaatattttagaagtaaataacctttttaaaactttacaggctcacagctatagggacttaccttgagtctcagatgagactttggaattttgagttgatgctggaacaacctagcacatttgggacaattgggaaattatcatattttgcaatgggagaaaaacatgagctctggctggctagggacagaatgtaatgatataaatatttaccccctgatacctcatgttaaaatctgacccccagtgttggacgtggggcctaatgggtgctgtttgggtcatgggggccaatcttttatgaataaagagatcctgtcctctctcgcaagtgaatgaattgttactcttttagtttccaagagagccagttgttaaaaagagcctggcaacttcctaagctctctgttcctctcttaccgtgtgatctctgcacataccagctcccctttgccttctgccatgagtgggagcagcctgaggccctcaccaaatgctcaaacatttccagacatcagaatcccaagccacatgaaccttgttcatataaattagtcagtctctgacatttctttatagcaacacaaaatggaataagacagcgctctcatcacaggtatgtgtctctggcagtcagcccccattctcaagatatccagggtccgctcagccatgagtcctctcatcaatattctaactcttatcactcaagagattctaaggtttttaggagaaaccagggacaaagactaaatgtttttgttatacctcagattacccgcttttctttgaccacatatcttttataggaaaaggattataaaagtaaagaggtattggcgtattatcagagtctcattcagtcattcaaaattagaacagttcaccatcctctcgtatgaatatgtctcccagaatgaagtcactcaggtttgcagacaccactcaaccttaccaggctccaaaaacaagaatggtctcaaggacatatggcttcactcttttaggcacccagtataattgacctaagagacaatatcttctcttgctcacagcacttttgaggagttaagctaatattgaattttcctcattatataaccctttgatttagtcacttaccctcagccattattcctccttctgtccctttatatcagtcttttccagttttagaggtgacatcaggtttgtctgctgtgctgacctagactgcaggcagcaatagtattctagcatgccttccctcggtctactcttggtcatagagggtaggttatgtaggtaaggaactagtgggggccatctgaccaccaggctatatagctctatttactgttaatcctgactttgccagatgaaatgaaggcatagcaccatctttgagttgcttgggaattcttatataaagatgtaaatatatagttatggtttttggcttaaagataattcctgtttctggcactttgattttcatccctattcctggtaccactgcatcacatatgaaaaaagaaatttgaggtgaagcgtagtcattattccagcatcctctccccttcagaagaattgtatgtatagtcataacagcatcgtcctgatccatcaggtaaaagagaggaagctatctagaggagtcactcttgcagccccacccatgtggacagtgagcacattcatgaagatgtaaaagccagtccttcatgtttatattgcccaacaactatattgccagtttttagacaaacaatgcttcaactgaccatttcaattttctatcaaagttttcttctgaggaggacatctccctgtgcattgttagccatttgaggctgtaaagtgtgttttcttgcgtaaagaaatgggactcagcagtccacattggtgcaatctctttttttctggtgatttcatagcccttgaagcattgacctcttcccctggttgagcatagcccaatccagagtcagtgactttcctgtcaagatcccttggcagctcctttggggttgctgccatcagtctggcttgccagccatgtatgatcaaagccttcccactagagaatcacatagccatctgctgcctctgtctgttttcttgaccaacagtcaaaacagagatgataagaaatgagataaattaccaaaattgtgaacaaaagagagattatcactagtgaccctttagaaattcaaaagcattataagtgaagactctgaaaaacctgaagtcaataagttagaccacttagataaaatggacagattcatacaaagatagaaattgccaaaactgactcaaaaataactagaaaacctgaaataaggaaaaacaaaaaataataatgtattgcttgctgttttatctggcctaaaaagcccatttgtcagccttcagtcctttggcctaagtttagctcaaataaggactgtatatgccaagctttaattctctatgtgaatgataaaaccccatcttcacaagaggagatgggttatgctgtttgttggattagtgaattaagccccgtgttcccccttaaagagaaataaaaagagcatagtaaagagccctcacccagtgaaaagccctgggatcccctaacacgcttgccctacaccctatacatctcacaaagtagaggacagggagatcagggggcaaaaggaaggtcagaggaaaaggatttgggaggtcatgaaggagctaaacccaatgctcccttaaatccttatccaaacttgaggaaagaattagaacaatgtaaggaaggacaaacctgataaaaacaagcaatggggaaaggattcccgatttaataaatggtgttgggaaaactggctagccatatgcagaaaactgaaactggaccccctccttacaccttatacaaaaatcaactcaagatggattaaagacttaaacataagacctaaaactgtaaaaaccctagaagaaaacctaggcaataccattcaggacctaggcatgggcgaagacttcatgactaaaacacaaaaagcaatggcaacgaaagccagaattgactaatgggatctaattaaactcaagagcttctgcacagcaaaagaaactatcatcagagtgaacaggccacctatggaatgggagaaaatttttgcaatctgtccatctgacaaagggctaatatccagaatctacaaagaacttaatttacatgaaaaaaacaaacaactccatcaaaaagtgggcgacggatatgaaaagacacttctcaaaagaagacatttatgtagtcaacaaacatatgaaaaaaggcccatagtcacttatcattagagaaatgcaaatcaaaaccacaatgagataccatctcacaccaattagaatggcgatcattaaaaagtcaggaaacaacagatgctggagaggatgtggagaaataggaacgcttttacactgttggtcggagtgtaaattagttcaaccatcgtggaagataatgtggcaattcctcaaggatctagaaccagaaataccatttgacccagcaatcccacaatcccactactggatatatacccaaaggattataaacattttactataaagatacatacacacatatgtttattgcagcactgttcacaatagcaaagacttggaaccaatccaaatgcccatcaatgatagactgaataaagaaaatgtggcacatatacaccatggaatactatgcagccataaaaaggatgagttcatgtcctttgcagggacatggatgaagctggaaaccatcattctcaggaaaccatcagctacgtgttctctgggtctctcagagaaagacccacaagaacagaaaaccaaacactgcatgttctcactcaaatgggagttgaacaatgagaacacatggacacagggaggggaacatcacacactggggcctgtctgagggtagggggctaggggagggatagcattaggagaaatacctaatgtagatgatgagttgatgggtgcagcaaaccaccatggcacatgtatacctatgtaacaaacctgcatgttctgcacgtgtatcccagagtttaaagtataataatgttaataataataaattggatttgtaagtgtgcctttaacaagtactgaggttaggaattttaaaaaggaaatgaggccactctcggaagatcccctcagtttagcagaacagctagatcaatttttagaacctaatttttatacttgggctgagataattcaatcatgaatattctgtttactgggaaaaagacgggaataattagaagggcagccataatcatttgggagagacagcagcatcctcctgggtaatgagtcctgccagctaagcagaaattcccaaatgcagatcctggatgggataataatgaccccagggatcgggtccaaatgcaagaccatagggagctaataattagagggattatgcagtccactcataggacacaaaacgtccccaaagcattcaagatccaacaacaagaagaggagactccctctgcatttctgcagaggctcagggatcaagtgaaaaaatattcaggattaaatccagaggacccagtagggcaaggccttttaaaggttaattttgtaactaaaagctgatgtaatattactaagaaactgcaaaagattaacggatggaataaaaaaccaattaaggaaatactgagggaagctcagaaagtttgtgtgtgtgtgtgagagaaagagagagagagagagttaagctgctatacctgaaggaagagagagccagcggcacagctgtgtgtggcagctggcttctaaaagctgttgataaaggttactgctgagtcatttccgcagagctgcctgtttttgcagacagacaaggggagccagggcacagcacggctcggctcatgcccagagaaagaggaagaagctgagtgtgagacagaaaggaaatgggatgacagagagagaatagaagaggaaaattagcaagagagactaaaagagacagagatcaaagagaaacacagaaggtaaaactggggagacaaataatgtaaaaggaaaaaagagtacaagacaaagtgagagaatgctgagaggttggcagggctgggggaagtttctggggacttaagcaacaaggaggtgcaggggaagggtgcatgcagtgcgtggccactgaggaacgacaaaacccgggaactgggggatggatgcaagtgagaaagggatgtggaggagagtttaggatcaggctgcttgaggtgtaacgggttgcctacagcaaaaactagatggctgtttatcaggaggtggtcaaaaggattcaagttatggaagagtaaatgaataagataacattaaggttttgttgttttagtgagaggctggaaggccaccaggggcagttagctgtcagtaaggcagcagaagggctggggtcgctacataaggaaaatcagtactagggttgtaaactcaaatgactacagggccagcaaataataaaaaggagggctgcagggctgggtgggaactgtggcggctgctcagctcttcttacagtgctggcactgtgttgccagattgtctgctttgtcagaggacaaaattctgactttttatgtaaaatataattttaaaatgctgatattctgttcaaataacttaaaaacccaaaacaggcaaaagaggatgccagtttgcaatccctgaagtagagagagctcgtgctggggaaaagtctgccaaaatgctttaaggtggaatgtgtaaaagttctgtttcccagagtcgggctgggccaggggaggatccttgcagcccaggaggaggaaaagccactaagtcccctcccagggctggacaaactggagaccctttacagttgctgggtcaccagtgggggttgcttgaaacacaaacagtgcacctctaggcctgccacggagaggaacggtgcctttgaagcacaaaaaaaaaaaaaaaacaggaagggagggcggagccagaaatgccttttctaatgagagtacccatcagggaaggctccataggctggcagatcttcaaaccagcagctcttggcccaaagccaaacccagcagggcccggccaagggcactctgggatgccagctggtcagtcccttgcctccccaagttcctcctggggtcaatgggccctcgggaggtgactaaactaacaccagccagtttcttatgaaaaggagaggagaataagaaggcgtcagagtataactgtttagatatcacagagtatcaaactaaagttagtaccaaaccttaaaggaactctactacataatgggatgaggttgtttatgaatgggtcatcctgagtaataaatggtaaaagacacaatggctgtgctgtcatgaacaaaaacaaacaatccttatgtgaaaaagttaaattactcaataactggtcagcccaaacctgtaaattttatgcttttaaccagaccctaaagctcctagaagatcaagaagacactatatatactaattccaaatatgcctataaagtagtacacacctttgaaaaaatctggacagagcagggcctagaaaatagcagggcaaaataattggtacatggggaacaagttttagaaagcctcctgtttccagcagagacagccatagttcatgtaaatggccatcagaaaagaaacactatagaagctgtagggaacaggcttgtggataaggctgctaagcaagtctccctggaggaaaaatttaaactgtttagcccagatatccctaaggtgatattaaaaccccaattttcaaaagaggaggaaaagctaggcaagataggagccacttaaactaagaatggaaggtgagtgctccctgatgggagagaaataataaacaaacccataataaaaaatctaatgttggccgggtgcggtggctcatgcctgtaatcccagcactttgggaggcggaggcgggtagatcacaaggtcaggagatcaaaaccatcctggctaacacagtgaaaccctgtctctactaaaaatacaaaaaagtagccggggcgtggtggtgggtgcctgtagttccagctactcgggaggctgaggcaggagaatggcatgaacccaagaggtggagcttgcagtgagccgagatcgtgccactgcactccagcctgggtgacagagcgagattctgtctaaaaaaagaaaaaaaatctaatgtctatattgcataagggaagtcattggggtccccaggacatgtatgatgaaatactaaagaattatgggtgtatagaaatgtatgccctggctaaacaagtgtgtgggaattgtgtgaactcccaggaaacaacttaaggttaaaagaacttgtaacacaaaccccaccccttgagttcacagttcaccacttccagcttggcaactcagtgctaattaagacttggaaagaagacaagctccacccaagctgggaaggtccctatcaagtgaggcagctgtacaaacagctgatcaggggtggacacattacactcgggtcaagaaactggttaaaaaaaaaaaaaacggaaggtaaattggaagtgtatagatcacctaagaaaccctttaagctaattctaaggaaaacctaaaagtaagccataagcaggctccatcactgggggctgatatggttagaattaatcctaacacaaggggtgaaaggaaacctaagtattgtataagaaccacacgccacctaactgtaaaaatttaaagtgcaatcctatattaattactataaacaacccagctactctaaaccagaaatcttgaaggtataaattaaaaataaatatctcagaaaggaatcccgtgggacagttagcttttaggttagtcaccaactctaccccaagcccacccagaattactagaactcctggtcccattaacttcctttaacccaccaaacaataaacctaagagagtaaaaataattaaagtaactgacttaaggcagactttaaaaattaaaacaggatatagagacataaatgcctgtgttaaatgggtgaaattttcagcacaagccctcgataaaagtaactgttatgcatgtgctgctggtcaacctcaggcacaggtggttccatttccccttggatgggatactaatcccaaaggaatgtgttgcgtgttggctgtataccaagacaaggttgcatggggaaataagacttgtaaaagtctgtcattgctctttcccactttgcagagatcagatcctaaagcaatcccctcattctctatagggaatataaatcactcctgttgtcactctagacagaaggtgaggttcgataaacctgtgggaaaactcgcaacctgcacccacatcctaaatgtcactggtaacccagactgtggcaaccattcaactctccatataccccaggcaaatgtctggtggtatttcgggaaagggaacctccgtaacttgttaccgtccaattggaccgggacttgtgctttagtacaattggccattccgttcaccctgtcattccatgaaacagctaaaaatacacatggtcatagagatcagagtaatttagcaatttattttaacccatatataatgtgtgtgtgtgtatatatatatatatatacacacacacacaaacatatacatatacatatatatacacacacatatatatacacacacacacacatatatatatatatacacacacacatacacacaaggcttctggaacagtggatgaaagctttgtatatctatctatccatctatctatctatttatctatctaaactccataggagtacctagaggagtgcctaataaatttaaagcacgaaaccaaatacctgctagatttgagtcagcacttttctggtggtcaactattaacaagaatgtaaattagattaattacatgtcttataatcagcaaagattcatcaattacacgcaaaatgcccttaagggagtagccagacaactaaatgccactagctaaatggcttgggaaaacagaattacactggacataatattagcagagaaaggtgatatatgtgatatgctgggtggaaaatgtgacacttccattcacaacaatgctgccccaaatggaaccatcataaagggatggcagggactaacaactctagtcaacgagctggcagaaaacacaggagtaaatgacctttttactaactggttagaaggttggtttgaaaaatggaaaggaatggtaccttcagttcttacatctctcgtgattatggctggggtcttaacagccataggatgttgtatcataccttgtgtgaagggtttatttaacacaaaggttaattaaagcagctattagtaaacaaatgcccctaatgtcccaacagaatgacttactattattaaaagccaaactaaacttctcctcctataatgaagaaagtaaaaaacttccagaacagttaataaacaaagatatgtaagtgaaaataagaccaaaaagggtaaaaagaaaaagaggaggtaagtgtaaaaaataacctacatgtgaagaaggttcattttcataagtgccttagaatatgtttaagcaggccacatggaaacaaagagataaagaagcaaaatatactaagccacaatcccctccttcctgctttccctttgacccagtgtccaggagcctactggtcagggccccctcaatgacccccctccccacctcatcaaagaatttagtttgggctagcttgccatcacctaagtgcagtcactagggccataagtcaaatgctcagagtcttgagacagtcgccatgtattatgggtggctgcaacaaaatgcagcaaaaaatgcagcaaaaagaccctaaagaacatacttgaagtcttaatacaactaccaataggcgatgcccaggaagactataaccccgtagtactcagctaatgaggaattgggggagggacttgcacactagggaagaaatagtttgttgaaactgtcccaggtgtacctgcactccagacacctgatcttgcaagactgtcattaaaagtctctctttcgctgttctctgggtctctgagtctattctttgggtttgaatgggtgagtttctttctcacagggatgtagatggcaacgtggctctcattcccctcccaaataccccaactttcatcgcctgttccagaagccttgtcacctacaagcctatctgcacagaaggtatgaggggacactacagcccagacagggaccctcccatctctagcaactgtccccttttctcacctggaccctctgcacctgatgttgtcttcttcttgcatcaaaggacacagagaataataatactactaataatactaatgatgatgaaagcagcaacagcagcaacatatggaatggctggtcatcaactctgaagcaccagggccatccctgaaaaaaatggcctgttacacactgggcacccacagccacagccgttcctgctgcccccaccctggcctgatcctccttatgttggaaccctcaagggtggtcccagtttcactagaggacacagggtgagtgctgtgattcctgctgtatcccatggagcagatgaccctctgctcctctccttggggaatcctgcaggccacctctgtctggtaggtcccatcccattggacagaacaccccaagactgccgggcatcctggctcaaagacgccccatcctgtcaccaggtcagagagatattctggagatacaagccagagcccagcatatcagggtgatgttgccctccagggcctcactgcaggccacactcatggtggaggagggggggactggagaagaaagggcagagacaatgaggcacatggccaaaccctgctcccctctaatggagatgcagggaacagggctggtccgctccactgctccgactctggcagaagtcctcacggaccccagaccttctgcaagtctgtcctcaccctggggaccaattcctcaaggctggcagaaggatgggcctcgagactgtgtctttatgctctgggatccctgcattgatgctgaggaggggaatgtcaggggtgggctcctggtacatggggccagagggaactctttgggatgggcaggctgggaagcagatggggcagccttggccctgggggcttcctctcctgcctgacacccacccggttcaggcttctgtcagagggccccctgcttccccagattgtgacactggacccttcaatccctgacccattgtctttttccagtggctctaacaggagagaaaaatcaggatataacacaccaacagaaaacacatgcatccatagcacaaggagggtttccctggacagagttgggggtcggggtgactctagtggaataggggagaggaaagcccctacccaggcccagtacctgctctcctgacacccacacaggtttccagatactgctgtagtttctgcctgcagtctacccatatagggtgagagtgtgtctcagccggcatagcatcttccttctagaaatttgtgatgttcatagcaaaggtctgagttctggaggactgggatactgtccattcctgagtctccaggttgagagagaggaagagctacccataagagtaggaatgcctagagcccctggtgctgctggcttcctgatctcacaacccctaatctcctggagggaatgcaaggctacccccacccagcagttccaagtgaggaactcagaccagaggagacccctccctggccctcctccatgcctttctgtgtgggctgagtgccaggttacctccccgccgagctctgctgacccctattcctcacccctacccccagccagatctagtggggacagacaggtccctgctctctgcccccagctctcctggaaaaggcctcccatcactcttgcctgctgccaactctcacctcccttctgtcccttgatatatgccagggcccttctgaggtcctgcccattctctgtcaagtcctcagtctctgtgtcccaggtctcagctcccagaactgcttctgcccactgtccccgggacccagccctgcctttctgcctgttgaagagcaggaagggctgaccatccagatgtccctcagcaagaaaccctgactgcacagatccatcccaggacagcaccgtgaggttgtaatgaagactgtggggccctggggaacaagaaaccacagatgaaacttcttcctggaagtaacttcacattgatgtttaacacacaggtctgctgtctcaacctttctgaggaggcaggaaatgtacatatgcaaagggacaagaatgaggatttcagatacaaggaaaactgggagggcaggaggatggaggagcagactgaggaacagaagaagggggaatggagatggcaaacatgtaggccagctgccaaggcagggtggccacaggccacctaagggtatagggaggaggccaaggagagaggctgccctgcagtggtgagggaggagcacgaaggcagtggtggaaggaaggtcttgccagaggggagggtggaaatgggaagggacccaggctcagagggacccatgaccagcatggctgtgctacacaggtgagggtgagatggagtcacgggccgctgcctttgaggaaggctcatcatgtacaagatgggagtaagggaggatcagtgcatcttttcaagaaacagtgccaggaaaacgacattcacatgcaaaaagaaatgaagttggactcctgacttataccacatatacaagttaactctaaataaatcaaagacctacactcaggaactaaaactgaaaaattcttagaatgaaacattgggaataatcttcatgacataggttttgacaacacttttatggatataacaccaaagcacagacaacaaagaaaaaattgataagttggacccatcaaaataaaaaaaattgagcattaaaaaacacaatctgcagagtgaaaaagcaaccattagaatggaagaaaatatttgcaaatcatttatctaataaaagattaatatccagaatacataaagaattcctgtaacacaaacataagactcaaaaaaactatgtaggcaaagaatttgaatagccaattctctgaagaagacatacaaatggccaatagacacatgaaaagatgctcaacatctgtagttattagggaaatgcaaatcaaaactgcaatgggctactacttcacaccaattaggatggctataatcaaacacacacacacacacacgcacacacacagagagagagaaaaagcaagtttggcaaagaggtagagaaactggaacgtttgtgtagtacattgggaaagacaaagtggggcacctgctatggaaatcagtgtgttgcttcctccaaaaactaaaaaattaattactatgtaatccagaaattctacatctgggtatttacccaaaagaaatgaaagcaggaacattaaaaagatatttgaacactcatgttcatagcagcataattcccaatagccaaattcatagagacagagagtagaaccagtggttccagcggccagggggaaggaggaatggggagctactgtttagtaggcacagagtttcaggatgcacaaaaatgtgaatgtacttaatgccactgaactgtacacttttaaatggtgaaaatagtgaactttatatgtatattttacgacaattaaacaacaaaaaagaaattgtcacagtgtaccaaacaataatatagaattagaaagaggctggggtcctgttcagagagaaaaaaaccaaggcctgaggaagggccttcagagaggagtggtgctgaaggcggagcagtcacactccaaaagagggctcaggttagaaaaccctcacaggaggaaggtggtgctgggagaaggcccagaggaggggatgaccacagcccactatgtggtaagtgaagattttggatatgaagtctaggaactgacagcccaccggggtcaaggaaccgaaagaggatgagggtcaaggagccgttggactagagcctgttttgggtctgggtgggggtgaggagatgggcagggcaaggactaaagggtggcatgagaaggaagggggggtgaccctgggagaacttggggtaaagtgagaacaggaagggaggggttgtctgggggagggtggggtttggggaaggtgagaacttgctgagggcccaaggcagctggtcaagaggtgggaacagcataaggtcccaaggcagagaggggcagagggaccagggagggatggtccagcacctgagggtttcagggtggggtcctcaagagggtgaggctgaggatgaaggagtggggaacgggtcacctgaggcagggcccagagcaggcatctgcactggaggggaggggcatctgcgctgccctgcgccctgcctaaggcccaactttcattagcaccagggctccccttaagtggcctggaggggagtgggatggagggaagactcccctgacaaaaggcagcaccagaaagttagggtcagggacagctgggaatggagaggcataggggcagcactgggtgaaggctgcttataggaaaggcccataagggaggcaggagggacgggagcaggggatgagggcagaggacaccctacaaatggatcagagaactgcagatagaaaggggtagcagggagcagggagggcaacaggacccagggggccatgagaaaggaagctgaggaagtaggagggaacttggtgtccttagatcattggagtccacagtagctgggagggttgacagagaggaaagaaccctgggaacgggaggcgaagggataatgagctggggatgggagcagtcgcaggaagaatcctctgcctggagccggcaggctccaacccctcagcttgagagtcaggagccccatagtccccacagcaataggaagcaccagctcctggtcccgaaaaaaggagggccccaactccagggactgcggcccgccctggagctgagaacacgcggactccagggagaggacagggcttcagggacccgagagccgctctgagcaccgggggatgtgactgcctcagcggcagagctggaagggccctcgaatgccattcacaggaacagcccaggaacccagggacttcagaagggctggtttgtccgaaaagtgagaggaggcggaggagaggtgaggagagcaagtgcaagaagagaccagaaagtgcagggggcgggtgatgcgcgatcccgaggaggactgaaaagagactgaaaagcagggctgaggagtggcggcaaccggcagcgtccagctcccgcacctcgctgcacatcgcacctgagccccgccgcgaccgcatcgcgctcgctgcgacccattcggaccccccagaaacgccaagccgctcccgctctagccgagggctagaacaatcctgccacctcagcctcctgagtagttgggactacaagcgagtgccaccacgtccagctgtcatttaccatctggtaccaacccccattagacaatgaaccatccatgatcacgaactgtgtcccttccatcttcgtcagctttacgagcatttttttttccaatggaactctacctatgattactaaccattccccaggacccctagcctacacttttctgtagatgaaaatgtcatacaccacagagttttaacaattacttagttttcccatccacattcactgattatttatttcgagcattatcatttattgagcacaacagggactggggtcttgtccccaccttagagggattatttacactgctaaaggtcacaagggtagtgaggggcagagaggaagatggacccagctctcctgacactggtcccaagctcttccctccacagtgtctacactctctcgaggactttttctccctgtgccagttccagcaaaggatctcattcagctcacccccaagaagacttttaatacttcaatgacgatgatactaataataataatatgcaaagtttgttccaacgcatttagaggtgatcgcgacaagacatgaagccaatccctccctttctggggtaggggaggcagtgatgatcttggactttggatgagtcgctccccagggtctaggcctggctgcccctccccaaccaaatctcccaggtcttttctgtccaaagccctccccctctaccctacctccagctccttctgctctgagccatcaactacgttttctccctcagcactcgccttagattcctggacttaccagcacaaaggtgattttctcctcgcagactgtaggcgccactgctgggtccggaaaagaaagagaaaaggcccagcgcggtcgcgtgtgtaactcaggacgcggctgcgctgggcgcccgagcgcgttctcaggactgcggcccggagttcactgcgaggacggggatcacccatcatcccgccctggtctacggaaaatgacaagtgtttactgatatagaaacggaataacggcgctgtgggctggggagggccgagctgccttcaggcttctggtctccagctgcgcggcactcacacctgccgctgtgaaaatgcagacccgcggggcaggaattccgagtccgggctggagcgcgatctggaatctgactcgcttgaaacagcaccgcggtggattcggagccgggtgagcagggaactgcgcctcagcccctcccacgggccgcccactgattccaggatccgaaaacgcttccagctgctccgtcaccccaggaaggcagcgccggcctctgggcggttctggtggaaacgggctccgccgcccgcaggaaaactcacaactaagggaccaggaaaaagcctctcagggtcgcgcgccttcagtgaggatcctaatttacaccccgagtgtggccccgtcaaagactagagcgaaggtcactgaaatgacacaagatcagcgaggcccagggcgctgccgctcacagaatgcggagacacggctgcctcgcgtcccttccctgacctgccccaggcggacgcggtgacgtgtgtttgcctcgaggctggaatacatggggatcaaatgcagagaatggagaaaggagggaaggatggggggacatttcgaggaaaggaagggagagggagaaaaggggagagaaaaggtgaaggtgagaataatatctgaaagatgtagttttattatttctaattttatttttgccctttatctagttttgttatttatgaacatttttaccaaagcttttttttctctgtgtgtgaatctgtaaatatacggcttattattcttatttcagagcctgcgaggtcaagctgcagagaacatgagcttctacctccagatgtgccagggtgcatctcgtgggtgcaagaacaagggttttgttttgttttacaaaatcaaagtacaaatctcaaatagaataatatttttaaaccattattgggacatactttgcacacaatcagtgtatctatttgaaatgcacagctcattgagttgtactgcttggctgttttacacacccacatatccactaccacaatgaagataaagaaataacatttccatagtcccctaaagaatagccacgcgataaaattccacgcagtccttaaaaagaggaggataaatttgtaagtattgttatgagaagatctgtgcccagcctacttttatccatttttaaaaggacgaggatatatggaattataataccagtaataccacttacataatatatattttaagtaggggaaaacatggaggattattccccaaaattttgacagggaccccagggactgggataacgttgtgactttcaccttctctgaaatgttggaattttatattacagaataaacttggattttggccaggcgcggtggctcaggcctgtaatcccagctctggaagctgaaggatagcttgagcccaggagttcgaggctgcagtgagctatgatctcaccactacactccagcctgggtgacagcaagagatcttgtctcagaaataaataaataaaatttaaaaataaaaataataaacttggatttgtgtggtggttaagaaaaaatatttgtttgaaaatattataaagataagccacacacccaaatagttacaggattttaaaaaccaaagtgttaattaaaacccaactccagaaactctcttttaagggggcttcatattttcatgtcattaaatctttctcaaagtatctttgatagagccgtttttagtgcagtagagagatgtgtaacaattttacaaaaggggcgggctgtaataaaaagggaaaggcaaaatccagtgtggacacactgtcccatttattttcaaagcacgtttgaaaactgcgctgctatagcgtctttgggttgagacaaagtcgaggaaaatcttgttcctggagtactgatttcctttttcccagggccaaagtctaaaactcagaagcaagtctaaaaactcaggctgactttcagatctgaagaaatctcaagaatatttgtgtggaagaacattccatgctaatgggtaggaagaatcaatatcgtgaaaatggccatactgcccaagctaatttatagattcaatgccatccccatcaagctaccaatgactttcttcacagaattggaaaaaactactttaaagttcatatggaaccaaaaaagagcctgcatcaccaagtcaatcctaagccaaaagaacaaagctggaggcatcacgttacctgacttcaaactatactacaaggctacaataaccaaaagagcatggtactggtaccaaaacagagatatagatcagtggaacagaacagagccctcagaaataacaccacatatctacaactatctgatctttgacaaacctgagaaaaacaagcaatggggaaaggattccctatttaataaatggtgctgggaaaactggctatccctatgtagaaagctgaaactggatcccttccttacatgttatacaaaaattaattcaagatggattaaagacttaaacgtcagacctaaaaccataaaaaccctagaagaaaacctaggcattaccattcaggacataggcatgggcaaggacttcatgtctaaaacaccaaaagcaatggcaacaaaagccaaaattgacaaatgggatctaattaaactaaagagcttctgcacagcaaaagaaactaccatcagggtgaacaggcaacctacaacatgggagaaaatttttgcaatctactcatctgacaaagggctaatatccagaatctacaatgaactccaacaaatgtacaagaaaaaaacaaacaaccccatcaaaaagtgggcaaaggatatgaacagacgcttctcaaaagaagacatttatgcagccaaaagacacatgaaaaaatgctcatcatcactggccatcagagaaatgcaaatcaaaaccacaatgagataccatctcacaccagttagaatggcaatcattaaaaagtcaggaaacaacaggtgctggagaggatgtggagaaataggaacacttttacactgttggtgggactgtaaactagctcaacccttgtggaagtcaatgtggcgattcctcagggatctaggactagaaataccatttgacccagccatcccattactgggtatatacccaaaggactataaatcatgctgctataaagacacatgcacacgtatgtttattgcggcactattcacaatagcaaagacttgaaaccaacccaaatgtccaacaatgatagactggattaagaaaatgtggcacatatacaccatggaatactatgcagccataaaaaatgatgagttcacgtcctttgtaggaacatggatgaaattggaaatcatcattctcagtaaactatcgcaaggacaaaaaaccaaacaccacatattctcactcatagatgggaactgaacaatgagaacacatggacacaggaaggggaacatcacactctggggcctgttgtggggtggggggagaggggagggatagcattaggagatatacctaatgctagatgacgagttaatggatgcagcacaccatcatggcacctgtatacatatgtaactaacctgcacattgtgcacatgtaccctaaaacttaaagtataataataataataataataataataataataataataataaagaccaaaaaaaaaaaagaatgtttgtgcggacagctacgctctaagaatccagctctcttgggctccaagctcaagctctctggggcttcacccagtgacaatggccggaaggacaggacacagtgaaatggcaccagtgagtcagaggccaaaggaggatttctggccccagcgcgcaggatgtgctttgttatagtggggttgggatagcggagcggaggcaaggacactctgggaataaatggcgagaaaaagtgcgctagggaggatccaaagccttcagacttcttcctttccttcctgttgggtgggaggggaccaacatggtccctggtggggaggtccgtgggatgcagagaatggggtcgctgcaaaggggcgttgcgcgccccacgcaaggcttctggcactcttctcctagctactactgatgagttcaaactagcaggagactaagacgtgtcctttgctatgtagactccatatcttgcacttcggctggtttactaaatccatcttaataaaacacaaaaacaaagaaccaaattctgcgtgtgatatttctgacctctagaaggtcctccctctccccattcctcgtgggctcccttcttgccccgccccctccgctttgtctccacttctccatccctgtccatctctggaccccgctcctgagtatctccccccttcttcagaggacttcccctcatggagtacagtctcctccacctccaggaaaaagagacaaagtccactgagaaggaactgagagactcctgttactccacccctgaagtcagcctgtcccacaacgctcactcaggctgcatgtgtgtgtgtgtgtgtgcctgtgtgtgtgtgcccgtgtgtgtgaatctgtgtgtgagagtgtgtctaaatatgtgtgtgaatgtgtgtgcgactgtgtgtgcctgtgtgtatcagttagcgtgtgtatctgtatatgagagagagtgtgtgtgtatgtgtgtgtgtgtgtgcgtgaatgagagtcaaagtgctaaacctggcatccaggaaacctccccaccttggcactgcacgcaggagtcagtgttatgtgcacctgtgcttttatttcaggagctgagacaattgtattaatcagatgtgcagagagccaagggccccacgctggaaagcatcagagaggagggtgagattggaggagcccctgactccaagtctcttgatcactcttacacagggatcttgaaaaaaaagtgcaggacactccgttctctcctgggagtgacagggaagccagagccactgtgcgtgtcaaattccatcaaagaaaaaccattatagcaaaacttccatgtcacagttttaagcctgcacaatgactcaaatagaaccaataccaaaaaaacaaattcctagctcaggtgaggtcagtgaagttggctgtcaggtgtaaaggaaactgcaggtataaagaaggacacctgtaggtagggctgcagcccagtcgcccctgcatcttagggcgcctggaaaggactgtctccattcaatagtgcagggtgaggacattttgggggagaaatatagactgtccttagacccctggggtttgtacatttactttctgactttttagctgttgacttcatttttgaacaaattacagttacataaatttgctttgactttaagtgtaaaacaggaaaatattcctgaaacaggaaacaagggccaagtgacctgcactgtcacccccctctgtggctccctgatgcaacacaattgtgagccaacaaatctatggctagggaaacagtcaactccatttctgcaaatgtttcagatgttccttcttgctgagtaatgttctagttttgccccagccttaatattttaagtctatattttcccagctgtttttttttgttgttgttgttgtttttgagaaggagtctcattctgtcacccaggctggagtgcagtggcacgatctcggctcactgcaacctccgcctctcaggttcaagcgattctcctgcctcagcctccccagtagctgggattacaggggcccgccaccacgcttggctaatttctgtatttttagtagagatggggtttcactgtgttggccaggatggtctcaatctcctgacctcgtgatctgcccgcctcggcctcccaaagtgctgggattacaggcatgagccactgcgccaggccttgttggtttttaaataatgcatgtatatttattatttggtttgttgtagtaagccatctggaatcaactgtggaaataaatgaatggttctctattaaataactgctgagaccatctgaaaaatgtattaaccccaaaaccaatcacttcacactcgtctactgcctcctccccagagccattctctctaggatagtaaatccgacgggccttccagctgggctgcctgctgcatctcatgcagctgtccatcacccacacaacaggcagagtgaacctttcgaatgggaattagagcccatcctcaccaccacatcccagagacactccagcctcttcccttcctctctccatttcctattagcccctcaacacggggcccctctggccattctggcctcatctcaccactctcagcccagatcactcatctgcactcgcaccagtctcttgtcactgctcaatcctgtctctgccaccggcccctgctggtactcccacatgcacttgctccctagggatccacatggctcactcctcatgccattcggttctctgctcaaatgtcccttagtcaagttctcaggaacctcttatccaacaaaatatatctcctgccatcctcaccaccaccaatcttctaacccgagtatattttctccataacaattatcactgatattagaataaatttgaaagttgttgtctgtaccactaaaacatattatttgaggccaggaccttgtccagccaccacttgtatccctagcatctagaacataccagtacagaggaggggcttaacaaataagaggtgaatgatgggtgaatataattggtatgctgcttttgataagcaattttataacatgtgtgtccgaggcgggtggatcacctgaggtcaggagttcgagaccagcctgaccaacatggtaaaaccccgtcttttctaaaaataaaaaaattagccaggtgtggtggtgcacgccagtaatcctagctactcgggaggctgagacacaagaatgacttgaccctgggaggtggaggttgcagtgaaccgagattgtgccactgcactccagcctcagtgacagagtgagactccatctcaaaaacaaagcaaaaaaagttcatgcagtttgaccaaataatttatatttgagaaatctgtaattctacaatgaaatgcaaaatatagaagaatctttaggtataaggatattaatcagatattatttacaataaggaagaagaacttgtaaaagaagagtagctgggtcattttttggaaatagtatacagccaggaaaagtactgtttaagaagagtttatgataacatataaagttgcttattgataataataaagtttgaaaagcaagattcaaaataactcatacagtgtgactgcactaagtcatcctgcacagacaccacatgcacagaaaccaggggtggaaactcagggggcagctgcaaagcacagctccagggccccttttcactgacgtctctgaggctctgccaggcagaggttcatccggatcctcccagtggggacacaggtgttttccatctttctgcttcactacattttttatattttctgtaattgagcagattctactttctaaaagggtaaaatgctgattatgaagttttacaacatttgaaatacaattttaatgaaaaagtccaaatgtcctgtcccaactcaggtcactttctctttttttagagatagggacttgctctctcacccaggttgtagtgcagtgagttgatcatagttcactgccgccttgagctcctgggttcaagtgatcctgctgcctcagtctccagagtagccaagactacaggaaagccccaaaatgaccatctaatttaaaaaaaaaaattgaacagaatacatctcactgcttcccaggctggtcttgaactcctgggctcaagtgatcctcctgccttagcctccccagtgttctaggataacatgggtgagccactgtgctcagtcctaacttagcttgaagcaaagtctcctctccatgtcatagggcaaaaactccagctgatggagccttcagaaagaagaaataaactcttcctccacaatgcctcatccatccctgggttataggcgtcggctgaatgataaagtcaacactgagaatatgatcattttagattactgattgtcatttaattttaattccaccacacctgagagagtgggatggattctttcttttattatgatttgagcatctgagtcccttccatcctgaacatctgacatgggtgcttcaaaaatgtaggtcttgagacttaaagggcacttggtctcctgagcaggccccctgcatgcgccacacccactaaggctccataacagtgggaagagcagccacagtcagagcccaggtgggttcacactgagggaccatccacatccagggtacgctgaggaggggctgaggtgagaatccagcccctgcctaggctctgggtgagaggtgggcaggacagtcagctactgagtattactggagctattgccttttttctcctgaagaccccacccctgcacacaccaaaactttacattctttgtggagcaattttctttttagaaatgtaaacaccccctaatcttaaagccacccaatatcactcatagtgacaccgcagtaggataagctcttaactcccaccaaattagcctcagagttgtagtttttgtttgttagacatggggtcttactctgtcatccaggctagaatgcagtggcatgatcacggcttactgcagcctcgaactcctcggccccagagatcctcccacctcagactcctgaatagctgtcactagaggtgaacgccacaagccccagctaatgttttgtgttttttgtagagatggggttgtgccatgttgcccaggctggtctctaaggcctgggctcaagtgatctgctgccccggcctcccaaagtgctaggattagcatgaagccccacaccaggcctgcagctgagtatttggagctaaggcaggaagttgctgtggagtttgtacccagctaatttgaaaggtggtcctgaaaggtaaagtgcgattaggtggaccttggtggggaagcatagatgtttctggtgagaagagaacaagatagatgggaagcttctaaaagtgaacatcagtgggccctgtgctcacacagcactgggatttggaagaccttttcccacccacttttggcttgtgagcttttattccaccttcttgtctcctaggtcattgcaggaaatcccttcatttggtaaacatttatcaaacacctaccatgtgctaggcattgtgttaaaggagctggggctgaggtaagaggaaccaaaccccccttgccttcaaggttaagccgtcttgctcaggcagagatcagtaaggaaactctttatttatttatttatttatttatttatttatttattcatttatttttttagacagagtctcactctgttgccagtaaggaaattcttacacaaatggttggcagaatatgcaacttgctttgcggatgcacatgtagaccatctgctctgaccaaggagtcacagaagcttcataagacacaacatttgagctgcgttttgaggtataaataggagtctgacaggcatccaggacaggagagcattgctcagaacccaggacatgaatttttctctcctaggccaggccaggactcagactaagctgactgaggagccaggtgcttcctggcaaggaagtgtgtcccatatatgactatccagaagtcacagctgctcaatattgagtcttgagacagagagagagaggcctgatttgaaatgcagaattctgctgggggcccgttaaaatgcagtttctgattcagtaggtctgaggcagggcctgaaaattgcatttctaacaagtcctcaggtgatgccaatgctacttgtcccaggaacacactttgagaatcaccaccctaaggcaatccatattgatttctaatatcagaagagggctgacaggcaaaggtataggataaactagaccatgcatgggccatcttggagagcaccccacccaagtctgcagcatttgatttccttgggatcccgggaatggcagacacccaggaaggaatcaaatgtggggttacagggcaatccagaggctgagcttcacacagcatctggggttcccactacttcacaagtggcccccacacccccaatccttcccaccccttatgaaactgacctacgagtcttgctctgctgtcctgggctgtttgggcctgggatgtgagctctgactataccttctgatccaaatacagggtgacctcatatgacacatacttagaatgggctcataatgagaaccttccaaattcagcaaatggattcaatcgtgtgttttccaggagaattaccaagtgttctcttttctaaatatcacatacttgagctcacatggacagtagaggaagttctgagcctgctgaagccacaattggtacattggaccccgtagaattccttgtagattgggcttcaccatttacatcaggatttggtcaaaatttccttcaccaaaccggttgcatttgttaagtaaccatgctctcattttgacttttaatgaatgaaagacagacacacacataaagaaagatagtgcaatgaaaaagaaaacaacatactgaattaaagtgacaggaaacatccttgtttgagaagtgatataatttttagacagtttttttttttaattaaggaaggtaagagaattaattctgttaggctctttttttaagttttttattttgaaggatttgattttgtttgttttgtctgccttggaattatcttttattttatgttttgacttggctcaaaactcaaaaagttaaaagtctctctcttatgctaccccatcttgacaggcagctatttatatcagtttcttgcttattctttcaaaggcattttatgcatatgcaagtcaatctaaatgtatatgtatataatctttctcccatttcacacaaattttagcaaactacatatgctttcctgcaccttgccttttcccttcacattgtatcacaaagaccatcacatgaagaaataccaagagcttagctacatctttgtttgaaattttcatgatacaccattgtatatatatgcaatattttaaaaaaaaatagagattgcttcttttgagtgcggtgctttttaatcagccccctcttgataggcatttggattatttctttcagagaacaattttgcatcatgtaacatcatatggaaaagctgtagtgaccccactcctatatgcatattctagggaaactcacatatctctgagagcaggaggcaatgtcccaggatgttcattgcagtgaggtctacaatagagaaaatctaaaggtcaatgaagagggaaagagaagaattgtagtatattcctcccatggaatactatccaccaatgaaagcaaatgaactatttgtatgaacatagattcatgtcatagaacatgttaactgaaaaagcaagcaaatgaatgataaaattagccagaaacaatttataagaagtctaaaagcaaagccaggcaaggtggtgtacacttgtaatcctagcactttgggaggtcatggtgggtggatcgcttgagttcaggagttcaagaccagcctgggaaacatggcaaaaaccctctctccaagaaatacaaaaattagcccggcatggtggagcatagctatacccccagctacttgggtggctgaggtaggtgtatcacttgagcctgggaggttgaggtacagtgagctgtgtttgtgccactgcactcaagcctgggtgacagagtgaggagacctgttctaaaaaaacaagtctaaaagacttcaaacaaagagatttcctaaaacttagtaaaaatataaaggcatacactaaattcaagtcacacatcctcttgcaattcttgatttgctcagtacagtactgactgaaacatgtgcatatcagagctgtgaaaaatcaaggctatctacatatatttctattatttttctatgtatactacatatagccaataatattaaaatgtcgccaattgacaaacctgggtggtgccttcacaaagattttttataattttctattctttcttccagctggaactactttgaattaatgtttgtgaagtgaatccacaggaactgagcaaaataagaaaagagttattgagtgtgaggaaagctgcacagaggtacagacagatggagagatgacaatactgagcatgtcagtgaccttcacagtaacagacttcctggaggagtgtgagcttgagccagaatgaagaggataaaatataaaagagggatgaaggagtggggactttagggggcaaatatgggattgagtaggccagactgggaagcgtggatggattctaaacattccgctttaggtctagcacttagagaaagagaaatcatgtttatttagctccttccacaatctttagagaaatcttctgaaacattacaaaaaagacacatgaatggccaatagtcatcagggaaaaatgcaaagtaaaaccacagcgagaaaccactaagcacttattagaatggctgaaatttaagtgattaataaatataaatgttgtcaaggatgtgaaacagtctcatccactgcctataagaatataaaacagccactctgaaaatcacttttatatcatctaataaagttaaacaagctagtactctatggctagcatttccactcctaggtatttactcaagtgaaataaagattatgtccaagaatccctgtacaataatgtccatagttcatttgtaacaataaaaaaccgtgaatacccccaaaatgtacaaaaaaattgtgactcagtgatacaatgcaatactaccagcattaaaaatgaatgaattactgatacatgcaacaagctgggcagaccacatagatattacaccaagtgcaaaaagctaggcacaagggaggccatatgggatgaatggatacgtatgaagttttgaaacaggaagagctactctatcatgatagtcatcagatcaatggctgctggggaaagggggctaatttgaaggcagaaaaatagagaacttcgtgtatcttcatagtggcatgggtgctatggctgtatttgtcaaaattcattgatgaatttgatacagatctgatcatttcagtatatgtaaattttacaagtttaaaatgcttacaataaaaatttaaacgttagtaataaaaaatagtaattgaaaatattagcaacaaaatccaacaacagatcaaaacaatacaccataatcacgtgagttttatacccaggatgcaaggattgtttgacatatgtgaatcaaaatatgtcatataccgcatcaacagaatgaaggacataaaccatattatcatctcaatagatgcagaaaaagcatttggtgaaactaaacattgcttcttaatgagaactctcaaaggagttcctctgacaaaggaaccaagaatatacactggggaaagaacagtctcttaaataaatggtgctgggaaaatgctaccagatgcagaagaatgtaactagacccctgtctctcaccatatacaaaaaatcaactcaaaagggattgtagacttaaacgtaagacccaatactgtaaaactactagaagaaaacttatgggaaacattagtctaggcaaagattttatggctaagacctctaaagcacaggcaaaaaaagtaaaaatagacaaatgagactatattaagctaaaaagcttctgcacagcaaaggaaacatccaacagaatgaagcaataacctgttgaatcgtgaaaatatttactaagtattcaaccaaccagtatattcatccaattagtatattctagactaatatctagaatatacaaggaactcaaaaacttggcagtaaaaaatacaaataatccaattaaaaagtggacaaaggatctgaatagacattccccaagaggaggcatacaagtggccagcaggtgtgtgaaaaacacccaacatcactaaataccaggaaaatgaaaatcaaactacaatgagatatatcttaccctaaccctagttaagatggctattattaaaaaataaaaaataatagatgttggtgagcatgtggagaaaggggaatgttatacactgttggtggtcatgtaaattagtgcagccattatgggaaacagtagagtgatctctcaaaaaaactgaaactattaatagaactactatctgatgcaacaattctacttctgagtatttatccaaaggaaatgaagtcaatatatcaaaagagtacctgcacacccatgtttattgaagcactattcacaatagcaaagatgtgaaatcaatggtgaatttatcaatgggtgaatgaataaagtaactgtagtatatacacaatggaatgcaattcagccataaaaaaagagtgaaatcctgtcagttgcagcaacatggatggaaccagaggtcatgttaggtgaaatgagccaggcaaggaaacacaaatatcacatgttgtcactcacatgtgtgagctaaagacgttaatctcatggaggttgagagtagaatgaaaattaccagaggttgggaagaatgtaggggtgggaagatgtagagaggtagattaatgggtacaaatgtacagttatataaaaaaaaaaagttctaatgttctatagcacagcaggccaactaaagctaacaattatgtatatttaaaacagctagaagagtggattttaaatgttcccaacacaaggaaatgatacatgcttgaggtgatggattccctaaacaccctgacttgattattccacattctgtgtatgtatcaaatgatcacatgtgccccataaacatataaaatgttatgtattacctttaaaaaatatttttaaaataaactcaacacaatatgggacattttaaaaagtacaaaaatatgaccatgataaaaattggcaaatatttcctttttattaagatccactttgtaagttcaagcagaatgaagcccatacagcatcagaagaagtggctctcctgagagaatcttctccccagttagaaaggcagaaacagaattcctggagaaagtaagactctggagaactgcatagcacctcttcttggggtctggggttacccagatgtagggagggttcaccttctgggaaaaactaaacgttggttcttgttcttttttgttcttattgcaagaccaaaaattgagaaaaccaagagaaagcaccaagccaaagggatatactctcttttattttttagaatatccactaccaaggatgatccacgctgttatgagacgaattgtgtccctccccaaccgaaattcatatgttggagtcctatgttgagaagacagaagtggccatctacaagccaaggagagaggcctcaggaaaaagcaaccctgcagcaccttgacctgcacctgtagcctccagaactgtgagacaatacatatttattattttactcacccagcatgtggtactttgttatggtagccctagcaaattaaaacagaaatattaccttttctactctgtcctatgtatgaacatgagactttttaagaatatgaattacctgggattccaaaacatagagtgagtcaatggaaaatagatgatacagggtcatttccaagcctttgtgggtctcctggccaccacacaaacatggatgtgttcccatttcttttcagtttcacacagtgcaaaagttgtggacatagaatcacaaactgtgtttaatttatttgagacattgagtgagctagttttgccctaattttatagaaagatgatgaacaatcataattactaaaccaaagaggctttttggcaggggatggcaggtactatgttttctcctccttttaaagtgcattttcctaaagagtcttgtctaggagtaaatgtcatcactttgcttttttcctccgcattgatcacttggtcctccctgcatttcagtaaggttgctagaatggaggcatttgtccatgattcacagatgaatcagaggccctatgagtagagagcttctcctgaagtcacacagctcgtgagtggtggagcaatgacaggcacatgactctccaggtccctagtccagttttctgggtgccatgagaattacagcctttggttccttttacatgtagttcatttctgaacctgagaaggagaatgcacctcaggtgactaacagtttttgctcttctgtacttgtctgagaatgaccccaaaagatttttaaaggccaattctttggctaccaaccctattttgcccaggcatggacatggagcaggtgaacactgcctttacctgtgacatgcctgaagattctgagacctacgtgaatcaggtaagctccatacacagagggacacccactctcccacccacttattttctgtatcttttcacacttcacttcttcattcctccctctggctgtcttccctctttggggtcttctagtcctaacctctgtctccttccaggtgactagagcaggctggtttggaacagggcttgtgtcggatgagaattgtgccaggatcctcagtgatgggcagcatcactttaagttcagtgttaggagctacctgctgagacagacgtctcctccacagtgagtgctgatttcatgaaacccttagttcctccctattccttactgtgtcttcaatcccatcatgtaggtcatgggcacttaacgcataatgaacaattgactgcttcatgccccctggccgttgatgctgtgttgggacgttttgctgccctctatgtggggtctgtgccttttctcatattacatctcttccaccacgcccaagtccatcctctgaacccaggcagtacaccagcatctgcatgtgtgctgtgtgttcctgccttgctttgtcctttcatgccttattctcactgtgccatgtctccttctcagttgaacagatgcagtaggagactcgctcattctggaatgtgaccatctgcccttcaggagaggacagcagggtgtgggtgaaggagaccctgctgcccccacacctgacagcctccaccaccccctggctttcctcttctgcatcagcaccactcccgaaccatcattcctgatcgtcagaatttttaatgtaactaaacatgaaacacaagtgcatctgcattatgtgtgggtgctctctccctttattgtatttggggtaagattattttagggcatggtccagggtaaattcctgtaaggcctggatgccctgctgtgaggtcaaagggggacggactgcagagccctggctccccaactacctgcctatttccggccctttgttggggtctcttctgctttatctggcctgagagaggctgggatgtttctgatcctggggctcctggtggatggtgcgcagtatttccagggatggagggtgctgtgggcactggtgggaagcttgagtgtctccacccaggctttcttggtgcctcctcatctattccttcaaattctagaccttgagcaccagggcctgggcccctgaccccctcctgcccttccagcagggcctggtccagctccagcaactcctcagcttgggccagctcagctgtgttgggggctcatggccctggtgagggggagtggtggagggagcatcagccagggcagggggctgaggcccttggaacctgtattgcagggtctggctgtaaatgaggaattctacctccctttccctttttctagcccattagcttaaggcctcctgtactgagaagcccagggagccccttgtcttgggcataggcctctggggggcaaatagagatccctggctcagggagtataactggataccttgaacaaggatatggggtcactggaaagagaggaccggctgtccctctccgctaagaaataattaactgttagatgagggggaatttctgttcaagggctctgtggactgtgctgctctggagggggtggggagagagagccctgaggtctgagctggggtgtggttgggaaggagctgagagctcagagctggaactaggcaaggagctgcaggggtgagggtggtgcagggtgggatttagaggatttcccctgactcctgtgctgatccccttcacgtcctccacccccacccttggtgtccgtcaacatgctggggtgacctcatcttcccactgtccctggagctgttctactcttccacgcttgccttggggttttcagagcagcatctttgtgagtcctggagagctagggaccaggagggcaggaggaggtgaagacaacagcaccgagagatcctggaagagaaaggaccatggtagctgaggcagggagcagtctgagttgcctagaagacaccaagagttcgctccctccaggccttggctttgcttcagcacctggtgctgcataggccccacccctgccctgctctgctgcctccacctccctctcagcctggtcccagacagaatccagaccaattcctgtttctgatgtgaaaaatgatcctgccagtttaggcagagcttgctttagagcactggtgcccagccttccacaggtcttgtgtctgtttttcttggcactgggtttcttctcacttattcttctgaattggcaaggcaggaattacatcactagtttgcagatgaggaaactgactcgtatgggctcattcagcactcactcactgggcaagtgtctgtcagggccaactgtgggccagatgtgcccagggctctatagctagctggtggaagggcctggagggttcatattcaggtccacctgacttgaaaactcatattgaccttacttaagtactgattcccgatttacaatccatgccacaaactttattgtcatatctaaagaagttgccacagcagcctttagcaaccaccctcctgatcagccaatagtcaacactgaggcaagaccctcccccagcaaaaagattagcaaaacctccacaccctctctcaggatgttcctgcacctcacagctacagcagcaacctggtctccctgaggacacgaccccctccaaagtcctcccacatgggggagttttcccagggacttgtacccctgggttcagaggtgaggtggggtccttgctcctcactgtggttctcacacctttctccctccctcctccctaaacccctaagctgtcagcagattagggccccattccccatgttgtagccattccctttgtgccccaagccattcctcttaatcctgacccttgtagctcctggttcactgtcaccctctccagcagtgcgtctccttgactcttggtgacttcaacatacgcagatgtggtgggctgagtaatggtccccaaagatgtccaggcttaatcgttggaacatgtgaataggttgcattgcatggcaaaagggacattaatcatgtaatgaagattaaggaccttaaaatagggagagtatcctggactatctgcgtgggcccaatcaaatcacatgagccattaaaagcagagaaactgccctggctggagtcagattctgcagaagaggaaacagaggagaagctggagagaggaggtcagacgttccaagcaggaggactggatgtgccttaggcgccatgtgtgagtacctgagagaaaactctaggagctaagggtggctcttaacaaggaagtggaaatctctgttctatctgcaaggaagtgaattcagacaagaacttgaatgagcttggaagtggattcttccccagtctccaggaaggaatgcaggccttcccgtacattgatcttagccccatgagactgtgtggacttgcaacccacatgactgtgacatgataattaggtgctgtttaaagccacttggtttgtggtaatttttatggcagcaacagacacctatacagcagagaagatgcccttgctccctggactctcagatcctgtaactcctctcctccatgaccttctcctctctctgcctgaatctcatgcccttgtcatcccctaggcctcatcacggccaagaaccccagcccttccatactctcaatctcacacttcccactctctggccatctttccactcatccccttgcaaggtggccacaggctctgatgacacagacactatcattttatcatatgctgtgatgtaatatcaatgaaccactcatttcctatgtgcctgcattccaggcttggagtccaccctgtggtacatcaattccaacaatccttccagcccactgggattcccaattgagtgatcctgccatctactccctgtcactcacccttggtgtcctctcctccctcttctcccattttgaattctacagtaaataatttcaatccctcccttgcctctcccttgcattgtcatactcacctggcaaaactacacagctggtgggttccacctctgtctatgctgcacctgccccatgagctgcaggaggctggacagcagcacacaacatgctgactggtctctttaagattccaaacctcatggggagcccctaccattgacgtggccagcaatcaccctctccctacgtggttcaccctcagcctcctcttggcctgggtgactcctagacaccttctctctgtgctcacacatccaacccttcttccccattcttacctcagctgacaaccttgcctcctacctcactgagaaaactgaacacattagaagacaacttccccgattccaccactgtctgctcatgcatttgcagctgcaccacatgtcaggcattttaccacgggagggattgctgggggttaacaattctgctcccagtcagagccagtccctcttctggtgccccaaacatcatcccttctcatctacttaaagttgtcagttcatcaactagtatctttttttatctttatcatcaactttttccctctctccccactggatcattgtggcagtcatgagaatgcacatcccagcccctcagctacaggaagcagaatcgatgatgaccccagctcttgaagcttgaaatctattgccacatttgctctgatcccacacctgccccctgatcttttccagccaatgattgaggaaagcagggcagaaactaaggcaggaatatttctcctctgaaggctgactgcagccccagggctccctgcctcctttactaaatttcccttagcctgcacagggtctaggatgcttccagctgaacttcctgccctctctccttcactggggctcagagttgcagtgtggtctgatggctctcccagtgttttctgtctctctcctgaatttctctcacaagtatttccctgaataaatccttgcacatttactaccgtattgggctctgctcctcaggggaccctaactaacccaagcggtatgaagggtgacccatgaaaacaggcaaaaatgggaatttgaaataatcttgcccactgcctggcaggccaagaggatgccacccgggttggtgggggacacagaaagtccatggcataaggtgcagctgaggtgctgtggtctcctcagtgctgagctgagaagatgccctggttaggggaagctatggcaggtgaggtgatagaatgccctacacaataatgatgaggttgggggaaacctacaaagacagaggagttgggtggttactgcttggctgcgttgataccctataaaaggatcatgagaatctgcgggttgttaacagctgtcactggctacaggtgacagcctctgcagtgtctcatggagaggcctttatctcctgtagcgaaagggcagatagcgtggaatggcagctgaagacatcattacgagggccacagtgctccagacatgtctgacactcagccaaagcaggcctgttacaggaaagtcagggtcctggtggggaaacctgagattctggaaactggaaccaggatatccgatgggtgccctccaggaccctctgggaatgcagaggaggctcaccattatctaataatggttcccacttcctacgctggaagatgctgcaaaagcctcacccccgtgattctgcgggaatcctactcagcagctttgcaggaattagccgccatttccccacaggagcccaaggagcacttctgggattggaatttgagggcgtttgatcaagaaaccagaatttcaggctggatgaataaaaatcctttggcttggaggcactttctcaaggcatgggtttgtcaaacaccccaggactttgataagtggagctaaacccaccgctggggtgaatccatatagattggaaaaaaagatgcccaactctcaacaaggtagacatgtcttagttgccctggtacatgtaaaggaaggaataacgaggctgagggaagtgggcatggtgaaggcccaccagggccatgctccacaagagggcccagaggacacaaccttccaccagagcctcaggaacatgatggtgaaagggacctgcatcactaagtataggggtgttgtcctctgcaggctgcgggtgatggtaataaagatggtcccagagttgcatttatccatatccctggggagagtgtggccctgaagagacagagaagaagtggtggcagtgacctgaaaaagcagagggcatggttactatggcaacttcagagtagcagccaggaggactcaagttgcagggaatgtggggaaggttaatagagggtggtgtcccagggttaggacaggcagccaacaagggcgctgcttgatatctatgataggaatgaaagaattgaggagcaggagggtgaaggtgtttgacccaatacaaagtcatgatcccatcctcaatgcctagacctcagccaagattcagattcagatctcagtgacagaggaggagtccatatccctaggaggaagaccctgcaaccctgtggaagtatatgctggcacaattccctcaatcatttggcaaaggaacctatagacatttacttgggtggttgtacactggggaaaggaaacacgcagaactggagggattattgacactgggtgtgagctgacattgatgcccagatgcccacagcactcatgtctcccatcacagtggggcttatggaggccagggagtaaacctggacaaattatggcccacaatgggaccactgggccaacagacccaacgctggatatctttcaattccctgagtgcatgattgacactgctgcactgctaagtggagtcacccccacactgggtccctagtctgtggagtaaggactctcattgtgctgaaagccaaacggaaacctctgacactgcccacatcctggccaaatcaaaaaccatagtgtgtcccagggtgggtcttgtggaagacactgaaagtattatggggtcgcaccaacattagagagctgaaggatgtggggtggtgttggggctgtctattgtctctatgtaatccagcaacctgtccctgagggaaactggtaaggcctaaagaatgaatgagattactccaggtctggccaagtaggagttataattgcagcttttatgttgtctggttatcactggtagagcaggttaataaagccccgggcacacagtgtgccgctgtggatttggtgagtgcattcctttccattccaattagaaagtggatatgggctgggcgcagtagctcatgcctgtaatcccagctttgggaggccgaggccggtggattacctgaggtcaggagttctagaccatcctggccaacatggcaaaaccccgtctctattaaaaatacaaaaattagccaggcatcatgtcaggtgcctgtaatcccagctactcggggggccaaggcaggagaatcacttgaacacagaaggcagaggttgcagtgagccgagatcacgccattgcactccagcctaggggacaagagcaagactttgtcaaaaaagaaaggaaggaaggaaggaaggaaggaagaggatatggagtgattcacattcatgtggaatcaacgacacatttatttattgtttgcctcagggctattgtaacacctgtgccctctatagtataggcttaagactgtactggacatactgcatatcctttaggatattaaatcagcacatttcattgacaacttcatgttgactggagtagatgagcagcaggaagaaagtgcactgtagtcctttgcaaaacacacgcaccccacaaggtgaagataaaccttatacagcttcaaaggtgggcactgaagtgaagttttatgggtgaacaagtgccaagtgtttaggggaatgcaggtgtgtcccctccaaggtaaaagaaaaactgttgcatcttgcatcctcaccagaagcaaggaagcacactgcttggtgagcctctttgaattataacaacaccacattccacatctagacattttgctttggcccacagtctaggtgacataggaggatgccagcttcaagtggggcctacacaggaaaggaccctgcagcagatccaggccatggtacaagcagccaccatccctcagacccctggggctggtggtgccagtggtggggaaagacacaggatggagctgaaccaagcaccagtgggagagtcacagtggagggcctgggattctggagtaagatcatgtcatccacagcagagacacatgccccctgttagaagcaacttttagtgttccttgtcctgattcaatagaatgtttgaccacgggataccaagcaactacggggttccaagtgcctgtgtgacccacaaagtcatagatggtacaggcccaacagcattcatcatcaggtgaaaacagtccacctgggttgagcttgaatcccttgctgacacccacagaaaacacccaagtctgaagtggcactgaactaccaaacagacaaatggcagttagccagctttcaccatgggtcagcccaggcctggtaggatgagtgcatgaatggagcaaccacagtggcaggcatgaggctccgtaaggggccagcagcactgacttccccacaccaaggcagatccagctgctgccacctctgaatgtccaactcatcagcaattgaggcccatgatgtgccctagtggggcactatttctttacatgactacccactaagtaacaagttgactacatttagctacttccaacctggaagggccagagtttcatcttcacagggttaggtaccgattctatgggtgggttttcctgtcctgctctcagacacagccagcaccactctctgggtgctgttgacattcctggtctgcaggctaggcagtgctcctagcccattatctgcctgaaggacccactttgcagggaaagtttcagtgtttccacggctgtgggttccactaatcctatcaccatctgcactacccaggagctgccagccacaaggaaggctggacaggtcttctacaggcacaactcagtgccagcctggaggaagcactctgaggggtgggtgccatctttcaggacacagtgcattgtttgaatcagagacgtctctagagttctgtgttctcaataggaagaacatgtgtgtccagaaatcaaaaggcggaagcaggtttggctccatgtccaatctcttagattcactcaatggggtatttcgcatattttatctcccaacactgggctgtgcaggatacgaggttctggtttccaaaggagtgtacccctaaaaggagacaaaagacagcccactgaactacacattactttagtcaccagagaagtttggacagtgtgtgcccagataccacttggtgagaagaagattctcctcctctccaggcccaggtaataaatagatcctcatccccaggagaaggcatggctgtttcacacaagggtagaagtgtgtgtggaaaccagagatccacctgggagccttctggtttcccttgccccattgtaagtgtgagcagaatcatccagcaattcagcctgagaggatttgatttccaagggcccagacccgtcagggcagaaggtttgagtcacacttgtgggcaatctcccaaggccctgctcttgtgttctgacatcctcagtacattggtgctgaggccctgcttcccatgggctgttcccaacgactgatgggtcataccagtgacactaaggcaggacattcctaggagacaggggactcctctgatggccaattgtagctcgaggactcctctatggccttgctcagtgaagtcctcagatgatgcaggcctaggctgacaactggactgcaaccttgtgagaggccctgagccagaagcactcagggaaacctctcctggatttctgatcattggaaactgtgggagatgaggaatatttgttgttctgagctgctaagttttacataatttgttatgcatagtaaataactaatacattttcacaagacaggatgcattattacatgttaatttgcatttgctctaaatttatcatcatcattattattatttttgagacagggtctcactctgtcacccaggctggagtgcagtggcatgatcaccatgcactgcagtgtcgacctcctgggctcaagggatcctctgaccttagcctcctgagtagctgggactatagtcatgaaccaccatgccaggctaattttctagtttttttgtagagatgagagtttcaccatgttgcccaggctgatcttgaacttctggagtcaacaagtctgccttcctctgccttccatagtgctaggatggcaggcgtgagccaccacccctgcctaacttaattataagacattaaacatgtaacttagttttaaaaggaaaggagaagttccatggctgaagaggatgtattttattatcgttcacaatgatcactttacttgaacttcaatttccaactgtgtcccaattaaacacaaaaggaagattcatcccttgctagagtgattctatgatggccccaacaaccacctcctggtcattcaccttcccccagttattcaaccaactctaatgtaggtgctgctgtgaaggaatttagcagacataataaaggggctcaattagttgacttcaggctgggtttatgctgcttggactgtcctaatcaggagagtccttgaaaggactgggttcttcctgagcatagagattcacagtgtgagagggattcagcatgaggggtttcctccactgtgggctttgaaaatgaaggggctgtgtaggaaacaacactggtgggcaccaggaattgagtacagccctccctgttctctacattgacagccagcaaggaacagggacctcagtcttaaaactgcaagaaagcacattctgccacctctgtataagcctaaaggaggattcaaaatgaagactcagatttgggaagcctggaacagagattccatctacatcatgcccagatttctgactaaggtactataaacagataaatgggtgttttttggccaggcgtggtggtgcactcctgtaatcctaacatttgaggagctgacacaggaggatcacttgcagccaggagtgtgagaccagcccaggtaatacagtgagacactcgtctctacacttttttttttaattagctgggtgtggtggcacttgtctgcagtcctgtctactctgaagactgaggcaggaggattccttgagcccaggagtttgaggctgcagtgagccatgatcatgtgactgcacttcacgctggatgacagtttttagagactctgtctctaaaaacaaataaatgaatacaataaataaaaacaaataaataaatacaataaatgggtgttgtttaaagccaatgtttgtgataattttttacacagtcttataaaattcatacacaggctcaacagactaatggaatgaactgatgaattgatatatacactagttacataaaataaaatctttctgaactttttcagtgttttgcattttataattatctgtgatgcaatttaatatactcatatttcattcattcagtcaacaaaaattaatttagtccctacaatgaaccaggtatcccctcatatgctcacgtgcctgacattctagaagcttcacaagaccaaggtggagccactggagtgttttaggtggagaaatgacacactttgactcacattagcaggaccactatggagagaacagtcacgtagcaggtaacgggagagtgccagtgtcacaattcaggagtgacagtgtgatggggactaaggggagaggaggggctgagtgataagagggacggagggaagggctggagaagcagtaggtgaggaaaaggagtagagggatagaattcaaaagcagcacaactcttaggtttgaacactttttttaatggtatttcaatagatccatctacagagcctcgcagggtgttacttgcagttggcctttaataccttaagtgggtctgcttaaaaactaattgtttttatgttaatcaggttttaaaaatactaagtgttcctaagaaatatacacaccacttagatgtggatacttcctaaaaacaggcagtgcatgagcactggtgatggacattgtgactgcatcgagcgcttgcaactttgaggtgaatgaagtctgtactgactcctggttgcaacacataggaacacagtggctactttgtattgaggagatgtcctggactcacagaaactcagggctatggaataaaggtaaatttaaaacaccacaagcgggagtcacagataccttgtttgcaaaagtgaaacttaggagctttgtgagtcctgttgtaatgcttttagacactttatatatcaaggggccaaagtcacatgtttttaccgattagattcctgatcattcaggggttaccaagattctgctacccactgtagttaatacacaaaaagcaaactggtctctatactatctcatgcacccaggcacaacttttccagatttaaagaaaaagaaaaaagaaataaaagaaaaaaacctctgtctctacacctccattcccagggagagctccctctctggcaccaagctccctggggtgagttttctttttgaagagtccaggagaacaggtaagcagtggggaagcagggagtccatttcagggacaggaattcccggatgaaaagtgaaaggagagggacggggcccaagctgagggtttcttcctggtttctcggacagctcctggaccaagactcagggaacattgagacagagcgtttgtcacaggaggagcggggtcagggcgaagtcccagagccccaggcatggctctcagggtctcaggccccgaaggcggtgcatgggctggggaggtgcagcattggggattccccatctccgcagagtttctcttctccctctcccagcctgcgacgggtccttcttcctggacactcacgacgcggacccagttctcactcccactgagtgtcgggtttctagggaagccaatcagcgtcgcgcggccccggttctaaagtccccacgcacccaccgggactcggagtctccccagacgccgacgatggggtcatggcgccccgaaccctcctcctgctgctctcggggaccctggccctggccgagacctgggcgggtgagtgcggggtcaggagggaaacggcctctgccgtgaggagcgaaaggtccacctggctggggcgcaggacccggggagccgcgccgggaggagggtcgggcgggtctcagcccctcctcgcccccaggctcccactccatgaggtatttcagcaccgccgtttcctggccgggccgcggggagcccagcttcattgccgtgggctacgtggacgacacgcagttcgtgcgggtcgacagtgacgccgtgagtctgaggatgaagacgcgggcgcggtgggtggagcaggaggggccggagtattgggacctacagacactgggcgccaaggcccaggcacagactgaccgagtgaacctgcggaccctgctccgctactacaaccagagcgaggcgggtgagtgaccccggcccggggcgcagatcacttactccccgctccatgcctcacggacggccctggtcccctgagtctccgggtccaagatcgaccccgaggctgcgggacctgcagagatcctcgacccgggagagccccaggcgcctttacctggtttcatcttcagttgaggccaaaatctccgcaggttgctagggtccgggccagggctcggtgggcggggctgaccgcgggaactgggccagggtatcacatcctccagggaatgtttggctgcgacctggggcccgacgggcgtctcctccgcgggtatgagcagtatgcctacgacggcaaggattacatcgccctgaacgaggacctgcgctcctggaccgccgcggataccgcggctcagattacccagcgcaagtatgaggcggccaatgtggctgagcaaaggagagcctacctggagggcacctgcatggagtggctccgcagacacctggagaacgggaaggagacgctgcagcgcgcgggtaccaggggccatggggagcctgctcgatctcctgtagatctcccgggctggcctcgcacaaggaggggaagaaaatggaaacaccaccagaatatcgccctccctcctgtcctgacggagaggaatcctcctgggtttccagatcctgtatcagagattgactctgagggcccaccctgctcttcctgggacaattaagggatgaagtctctgagggagtggaggggaagacaatccctggaagactgatccgcggtcccctttcaccccacagcaaccttgggcaccaggacttttcctcccgggccttgttctctgcctcacactcaatgtgtcggagtctgactccagctcctctgagtcccttggcctccactcagatcaggaccagaagtccctgctaccctgctcagagactagaactttccaaggaataggagattatcccaggcgcctgtgtccaggctggtgtctgggctctgtgctcccttccccaccccaggtgtcctattcatcaggatggtcacatgggcgctgctggggtgtcccatgaggaatgcaaagtgcctgagttttccgactcttcctttcagaccccccccaagacacacgtgacccacccccctctctgaacatgaggcataacgaggtcctgggttctgggcttctaccctgcggagatcacattgacctggcagcgggatggggaggaccagacccaggacatggagctcgtggagaccaggcccacaggggatggaaccttccagaagtgggcggttgtggtagtgccttctggagaggaacagagatacacatgccatgtgcagcacaaggggctgcccaagcccctcatcctgagatggggtaaggagagagatgggggcggccatgtctcttagggaaagcaggagcccctctggagacctttagcagggtcggggctgggtcctggaggtcagaaccctcacattcccctcctttcccagagccctctccccagcccaccatccccattgtgggtatcattgctggcctggttctccttggagctgtggtcactggagctgtggtcactgctgtgatgtggaggaagaagagctcaggtggggaaggggtgaggagtcgggtttgagttttcttgtcccactgggggtttcaagctccaggtagaaatgtgttctgcctggttaccgggaagcaccatccacattcatgggcctacccagcctgggccctgtgtgccagcacttactcttttgtaagcacctgtgacaatgaaggacagatttctcaccttgatgattgtagtgatggggatctgaccccagtaatcacaggtcaggggaaggtccctgctgaggacagaccttaggagggcagttggtccaggacccacatctgctttccttgtttttcctgatcctgcccttggtttgcagtcacacatttctggaaacttctcgaggttccaagactaggaggttcctctaggacctcatggccctgctaccttcctggcctctcacaggacgttttcttcccgcagatagaaaaggagggagctactctcaggctgcaagtaagtatgaaggaggctgatccctgagatccttgggatattgtggttgggagcccatgggggagctcacccaccccacaattcctcctctagccacatctcctgtgggatctgaccaggttctgtttttgttctaccccaggcagccaaagtgcccagggctctgatgtgtctctcacggcttgtaaagctgagaccctggggaggctgatgtgtgtgggttgttggggtaacagtggatatagctgtgctatggggtttctttgacttggatgtattcagcacatgatgggctgttgaaggtgtgacccctcactgtgagtgatatgaatttgttcatgaatattttttctatagtgtgagacagctgccttgtgtgggactgagaggcaagatttgttcatgccttccctttgtgacttcaagaaccctgacttctctttctgcaaaggcatctgaatgtgtctgtgtccctataggcataatgtgaggtggtggggagaccagcccacacccgtgtccaccatgaccctgttccccacactgacctacattccttccccgatcacctttcctgttccagagaagtggtgctgggatgtctccatctctgtctcaacttcatggtgcactgagctgtaacttcttacttccctattaaaattagaatctgagtataaatttacttttttcaaattatttccatgacgggttgatgggttaattaaaggagaagattcctaaaatttgagagacaaaataaatggaagacatgagaaccttccagagtccacgtgtttcttgtgctgatttgttgcaggggaggagagtagatggggctgtgcccagtgtgtgctcaggccaccatgggctttatgtggtcacagctcacctgggtcatctttgctgctccactgtccttggcccttcagtagaaccttgtcccaccaggacctgtgatcacagggacttggatgtcacctagggtggtccctacacatcgaagtccttccggtatgaagagacaaattttcagtcccctgtatcttttgccctccttccaggtctctttcctggattgtattttccatctttttccccagccttcttaaaggaagcagattctgaaatttgcagagaggaggggtcccatagtttctcatcgtaggtaactttctgttggaactcctcttctgctttcctactcttcttcctgcctgagttgtagtaatcccagtgctggctccaatccaaactcatgcatttataaagcagagtctgatttagatttatatggggttggaaaattggacccacaaggctaggattatctttcctgaacagaaaaatatggctgtgcgctgcagtgtgcaggagggttggtgtgggaggaggtgggaaggacacacaagcagccctggtgagaaaagcactggcagcactgatgttggtgtgagatgatgttgttctttagctacgttaataaagatattgcctttagaatacagaggtgctctacagtgatcattcattcaactgacatttgttgtctgctaggtatatgactgtttttgcatttagaaaacatcattaaagtaaaaacagaaaaatttctggccttgtggtgtatacgttctagatgcaagcttgtccaacctgcagctctcgggctgcgtgtggcccgggacagctttgaatgtaagaagtttttttgcttatctgtggtagcaaatatcatgaaaattatgcacgcacatgtttttcttttttctattctttctgctcatcagctgtcattagtgtattttatgtgtggctcaagacaatgcttattcttcccaactggcccagggaagccaaaaaattggacacctctgtaggcagatgatagatatagtataagcagagtaggaacagaaaatgcttgagttagaaggtggcaagtgctgtgtggcaggtgatccagagggtgggctgtggggacaggaaggtggctgttgtgctgggtggtcagcatgggccttgttgcaaatgtgaccttggagtaaagatttgagggatgtgaggagttgtctacaaggatgtctgggaaagttcttttcaggcaggggaaccttcagtgcagatgcactagggcaggaaattgtctgtgttcctggaaggaggaagaggccagaagggctggacacagagaaactgaagtgaggtcaaaggtgtggctagagcaggtagccctgaagggtgtgggaagggtgttgacctttgctctgaatgacatggggaggacagttttgaaaagtgggacatggtagggctcatcctttgaaagcttctttctggctgctgtgctgagaacagaattgagaggtggggaaccagtgatgcagtggggaaaatggtgggaaaggagtacagtattctaggatggacacgttgcttaccttgactagggtgtgagcaggggaaatagtgagaagtgaagggattctggatgaatttgaagatggactcacagcacttgctaatggatgtgagaagaagaatcaaggacacccacagtattggactgagtgagcagaagggtggagctgctgtcagtggagatagggagactctggcaggagtacacagaggagagggcatcgcaggcattcaatggaggagacatctatgaggaatgcaggtgaggggcccagatgcctctgcagctacagattcatcatccaatcactctcctactcccaccacccctgtgtctcagagccagagcactgattctcccctgggctgtgggcacaggtaggtgaaagtcagggaagttgtggtctgctattggttataataagtcacagatcattatgctttctcagataattaaagaaataataagagaatgtgtaattaggacacttagaagactacaataatgcaaaggtttttattcatctaaagaaggtaacataagaaaaatagttgagcaagaaagagataatattagaaggcagcaaatgacaatggacagacttaaacccaatgaggtcaataattacattaaacataatggactcagacactccaattacaagacaaatagtgcaggggggtaaaaataaataactaaataaataatcatgggctgtttacaaaagacataatttcagtagaaggtaaagaaaagttgaaagtaaaaggatagagaataccagacaaacattcatgaaagaccacatggagacgccatttagaaaaattacaggatatgagtctcctgagacatagagtacacgtagacagctcacaaggtctttttcccttttttcagagacagggtctgttgcccaggttgaaatgcaatggtgatatcataccttactgtaacctcaaactcctgggctggagcaattctcctgcctcagccttccgagtagctaggaccacaagcctgtgccgccacacctggctataatgtctcattttctcatttgctgtggtgtgaacaaggaaacaataccatgccatgtatttgacttgcagcaggtacacaacaaatgtcaggtgaattaagaaataaaaccacttagtaatccaagccatatccacatttacatcttacagatgaggagcaacatcccagacaagtaaagtaaaataaattgatttacatcatccagagcagaatcgagaacacattccctgtgctaaaggaatcagagctctactaggggtcatagcagatatcatgcaagtcacatatgttaattactagaacaggaattgatacatttcaagatatactaaacaaagggtttggaaggattaactgaatgcagaaatagaggaagaaaatggatttgtttaaaagatggttagaatctttaaagaaacaacatttttttaaagtggccttatgtggaccaaagcagagatgaactcaagtgtcaggtgggaaaatgcctaagtgcagcttctagacccaagggagacctaaaaatcctgggacattttcggttgtcacatggggattggtgggagggggtgagtggggtgttgctggcaaacctcccacaatgcacaggacagaccactccacaagattctctgtcccaaattgttaatagtgctgctgttgagaaacccgccccagaggtaaatgctgtaatgtcctcaccatttcacagattaagaaactgaggcaccagggggagaagtgtcagtaagacctgagctgcaggttgaatccaggccacttggctacagggtcttggctcccctggttaagtcagggacccagtagccgaccacaaacaatcccagctgcacggtgccttcatggtctgtgggcgccttcatggtctgtggcgccccctggtgttgacactgggcctgtggccaaatgaggcttgagggaaaaggaaaaaacaggtttgggtagggggatactctttcaggctctccagatttccagccacgacttacgctcagaaaaaataatgtccaccttaattatctctccaaccctgtttttccctgtcccggctagttccctcccttgactccatcaacatcggcacctgccagacgcccaccacccaccatgtaaggagtgaaaaggccccaggactaaatgacaagacgaggttccaccccagccatccctcccctcctagagctctagctctgtgcctttagtgcttaggctcttaacctggggtccaggaacccactttcctatgacactgcgtgaagaagtgatgttacacgcacacatgacttcactacaggacattggatattaatattcatcagatcagctagaggcccaagataccactcttctcccaacagtttgtgatcctctgaattaaagaaagggtagggattgagggaggccctaactccaaatcttctaccacttctagcgaagtgctgagaagaagtgcaaggtactcaacctgctctggggatacagcaggaaagcagagtgtttacggatttcacattccatcaaagaaaatccattttgacaaaatatccaagtcacttttctaagccccaggcagcagttcaaacaaataacatcaaaaaaaccaaaatcttggcccaggtgaaatcattgaagctataaaactttgtgagacctgtagttagagagaaggacaattcagtttagggctgcagcagaaaattcctatatcatattgtgttcttcttcatcatgaaggtcccctgaagggaccttctcccttcagcagtgcatagtgaggccatttccgtgcaaaaagatagaatctcctgggattcctgatgtttacacttactactcactccttcactttgtagatgccaacttcacattagacatctttcagttaatttccttactctgtctaagcagaatatttaaacttctttctgaagcagaaaaccagggactggttatgtgagctatcaccccactctgtggctctcttaagcaataagcataagagattgtgggccaacagaatttgtagcaaggtaaacataacccttcatttcagcctatgtttcagcttgtctagtgatgttccagtcttgctccagtcttaacattttaaaatttataattttacttgaatatgattttataagaagtcatatatattcatttctgttgagtctgtcagtgaaagccttctcaaaacaactgtgaagtaaagacaggtaaataaatgcatggtgctcccatgtattaatgctcactgcatcttacaaatgtgtcagccccactgcaacagatggtgcatcaacaaatggtgctggaaacctggatatcaacatgcaaaagaatgatgctggaaaaaattcatgtccttccattacacccttttcaaaaattaagtcagaatgactcaaagaactaatcttaagaattgaacctgtaaaaccctcaagaaaatactgaggaaaatcttatggacattagaattggtagtggtttcttggctggtgaccaatagtacaagtaatataagaaaaatgacaaattagaatgcatcaaaatttaaaaacttttttgcatcaaaggacactattaagagaatcaaaagaaaatgcacagactaggaggaaatatttgccaatcacatatctgataaagaattaatatccagaatatgtaaagaactacaattcaacaatagcaaaacaatctcattcaaaaataagtaaaagacatgaatagacaattctccaaagaagatatacaataaggacataaaaataaggaatgctggtcaggcatggtggctcatgcctgtaatcccagtactttgggaggccgaggtgggcggatcacgaggtcaagagatcaagaccatcccggccaacatggtgaaaccccgtctgtaccaaaaaaatacaaatattagttgggcatggtggcaggtacctgtagtcccagctactcaggaggctgaggtaggagaatcacttgaacctgggaagtggaggttacagcgagccgagattgtgccactgcactccagcctggcaacagagcaagactctgtttcacaaaaaaaaaaaaaaaaggaatgccaataaggacataaaaatatggcaaacttcactaggccaagtgttggtgaagatatggagaaactggaacacttgtacactgctggtgagagtatacagtggtgcagccaccatggaaaacagaatagtgattcctcaagaaagtaaaaatagaattactatatgagccaacaattccacttttgggcatacccaaaagaactgaaagcaggaactcacccagatatgtgtacactcaggcccatagcagcactatacccaatatccaaaaggtggaagcaaccgagtgtccatcagaggatgactggataaacaacccacggtgcacataagcatggaatattattcagccttaaaagtgaatgaaattctaattggatgagccttgaaaacactataagtgaaataagccagaaataaaaacaaatatgatattttacttatataaagtagctagaataagcaaattcatagaaacagaaaatagaatagagattaccaggggctgggggtagggagaatgggcagttatggtttaatgggtacagtttctgtttgggatgatgaaaatgttctggaaatggatattggcggtggttacacaacactgtaaatgtgcttactgccaccaaattgtacactgaaaaaatggttagaaggtaaattatatagtatgcatgttttaccacaatttacaaaaaatatatcaacactaaatccaatcacagctctcatcgagtttttttatactggtgtttcaacaagcacattgccgctgtggaggggaggggtccttggagttcttatgccaccatgttctttggtgtcacttctcagcacaactttggtggtcagagcacaacttggttttatacattttaaggggacatgagacagtgatcaacatatgtaagctaaagattgattccgtctggaaaggcgggacaactcgaagcaaggagggggcttccaggtcacagatagatgagagacaaatggttgcattcttttgagtttccgattagcctttccaaatgagggaatcagacatgtgtttatctcagtgagcagaggggcgactctgaacagatgggaggcaggtttaccctaagcagttcccagcttgacttttccctttagcttagtaattttggggccccaagattttattttccttttacagaaccatcaatacttacagaaaaaaaaaaaccctgaatgtacacaaacctctataccaaactaccaatttacagaaaatacaggtaatagaaatacattaaaccacaccttggcgtgcaatccacaaaatgcaaacaataggaaaccttaccatacaatataaatttcaaggagaaacctatggaacaaatgagaacaaaaaacatatttttaaaggtaaaactaaactataattttggatgatgaaaatataaagtccagcatagggaagcagttcctttagaattttagtcacaattaatggaagggtactgaaacctgctatttcccagttgaataacaggtcctggggatatagaaggtcttgccacaagttgaatccataactgctgctttcctggtaccagggagaacaggtttcctatcaaggactgggtaggagtgtttgccaggcctgtatcagctattgcccaagtttccactttacaaaagtgccatgcatacatgcaacaacatagtgccttctccatgcatcccttaagagatgaactgcatgctatcttagggccagtacattatgagtccagtgctgcccctattgtggagccctcacaggagatgtctccaatggtacatgaaggcatggccctcattcctgataatgcttggtacttagatgcattgagccaaggtaaccctgtgtatggacagtagtagctgcacaaccacagacagtatctggtttgagatgggaatgcaacagagcagtcaatgggcagaactccaagctacatggttggtttgtacccgtgagccaccacctatagttctctgtacagacagtctggcagtacttaagggtcttacaatttggcttgcccaaagggcctgagatgattggtatataatttaaaaatccttatggggagctgatatgtggaaagacatttggaaaagtctacaggaacccactgtggacctaattgcttcagcacactggtcagattcacctcccagaaacatggaggcagacatcctagcaaaaattagaatactgagctagttgattaggtacatatcacagtggggatttcagtgcatgaatgggctgccaaatagcaaagggagcaggattggctctctgctatgcagatttagtggtggcggtagcaaactgcttaatttgttcccgtctgtacctctgccacatcccacatacacctggacatatacataagacagccacccctgtgacagactggtagatagactacatcagacccttgccagtaatcttgagacgaaagtatgcactaacatgtgtatacactgccatgggattgttgcaagctttcccttgtaagagcaaaccaaacagccaccatcaggggcttggagcaactcagtgtcatgtaaggataccctccacatattgatagcaatcgaggcatgcatttcaccagacacggtgtccaagactggatgcatgaaagggacatagactgggtatttcacttactgtatactcccccaagcaacagggttgattgaaaggaaaaatggtattttgaaggcacagttttgagcactctcaaaatccaatatctttcatagttagacaaagattttgcctcaagccattagaaaccttaatttagttgagacaaatatggtgctggcaccacaccaatgactcaggaccaccacagagatggatccattaaccataatagtaaagaaagtccaaccagatgcatctctgacctgagcagataaaaggccaatggcaaaggttatttagaactcctcaagatcttgagccagggaggagacacttgaatgggggttggactagcaacttcccctatgttggatagagcatttctttccagacagcaaggaattccctaccaactaaagtggtctccattgatcctgctgaagtctgggccaaaacactccacataccaataaactggaacacagtcccttttaagaagcaccctggctggccatttgacatggtcctttgctgcccctgtaaccttacacataataccagcgcctttgcccctcaggcaacatgtttggtgtgtactcccagcccacaatcctatgttcctaatcaacagagatggagctaccagtaattctgtttaatggggaagaactgccccaccaaatacctactaaacatttttaattccacccatagtcttctgttcctattgttgttctgctctatacctcttggtttggttcctgaataaacatggtaaagggcatttttaattctgtgtcttacacctggcatacatatcatcgcctgttgtttgtgttgttgctgtggcccctgcttaacaagtagaaaacaaattgataaaatgtgtcactcacaccatcaaaatgtcacccacagccctctctgaaggctcagggactatgggggaaatgtgagtccatgagattgtaagagctggattagagggctgggatgtggagagaaaagtgactccctcttggatgctaattctctatgctgacttctgattagccccagtcccaggactgactcctgattcccactttatttaccatccctattgtaagaacatgtcaaccttgatgttatacaaattctaggctatgacacattagcattcttacctgttctggacagtagtagcctttgtcttgcacagagcatgtatactcttcccctgtggtatataagccctgggtgtgggggtaataagtgcagaaacctacctgtcttgctgccatccaagaccacgcttctgtctgtaagttccccaataaaacactctttactgacaactagatttgtctgtcttgttccttggtttattggctcctttggcatttggggggcactttgcatagatggccctttcatggaacagagggtctgtgtggggctgggagcccaagtcagcacttgcagtcagagcctagaacatgtgctgaggagacagagctagacctgttagcagagacagacctgttagcggagtggatagctgggccagcaggtctgaagtaacgctatggaagagcaggccagtaacagctgaagagcttcagaaactcccacttctaacaaggtcacttcctctaagagggactactgttgtatcatagtacacagctgtctctgcctggctgtcctagtaaatatgcagcatttgggggcatccacactactggaacagtagccatgagaagagtccattgtgccagcttaattgcacccaactgtacaatgagaacatggggatcagtgtgttctgctacttctctgcttagcattcctgatatacctgctttacataggcaccatgtggcaccgtggtgtgtgcctgtgccactttgaatcacatttgggtatctattggaaggcttcttcgggactgttgtgacaccaactacactatggactgatccctgtcagaaggtaacaaaggggcaagggacagcatttccagtctaagccctggaatgtgcgtggcatcaaactgttttgcatttgtgagcaggaatacaactgctggacaacagatattccatcagccaacagaaactgtgactggctttaaagaaaatgggcttcccttggtcttgggaacacaagactcagcagtatagaaacagaaatggttgcaggtggaggaagcactttcgccggagtcaggaaagcatgaataacacaaaatcttcagcttttcctcccttctctctcctgagctttctgcacctctgctgtagcagtgatggcagcagtgtggagaacacagcctcagggaacaaccaaggtccaggatcactagcaaaggttatgagaaactatgacttcctttagaaaaaaaaaaaagggaaatgagagtgcccaaggtcttaggagagggctggtgcaggcctggggcgtagtaaattctttagcttgtctagattcaccatgccaagtggggaggttgcttgggtcagactatattaaaggacagcatctccaccctcccctagaggtctcagaatgtccactgactgtggctttagtggtccttgaacagaaatttggtaacatgaagagtagcagatgctggcatggtaagattacaaatgtgtatcagaagaattattttgtgggtaacagaaaaaacaacatataaagaaacaagttaataccatgagaatgtcattagccaaactcagaatgtggatcattctacaggacaagtaacctggcttttttggggaaacagaagcataggagagccagggtgacaccattttaaagtcaactccatctttcaactagcaaggcatattccttgccagtcacaacccatggtcataagaggtttacagctgattaaacaacttaataatgcctgcaagaacaaacgcctatgacagacaacagaatgtccacatgtcctgacgtcacattataatatatgcttttaagattattatagtcatgctttgatatactaactaaaatgccaaggataactttctttaaatcaataggtcctaaattttgtcatgctgtcagagcacccacacatagacatttaacttagcttttatgtagattaaacccctacattagaagagtttacaacaaagatggtgcattcttccttttgctttctgaggacacctactctgtatctgagtaactttcaataaactatctccttctcactgcactctgtgactcacctttaattccttcctgtgcaagatccaagaatactcttttggggtcgggatcgggacctgtttttctggtaacagtttctccaacaaatcaaagccttgagaaaaaaaaaataggtagggtgggtggtatggtatagaagaacagagaataatgagacataagaagcaattgcaatgtgtggaccttctctagcttctgtttcagacagaccaattgaaaaagacaagacagatatttgaatatgcattgactgtttagcaaaattagagaactgttgttaattttgttagtgtgagaatagcatggctttatgttttttaaaaaccctattctgtgaaagatgcatgctgaactatttaactgtgaaattgtatgtaaaggatttgcttttacaatcctccagagatgagtttataatgatataaatgatgtgataaataaatcaatggaggagaggaggcaaaatctctcctgcagaagaactccaaataaggtaggtagatactttgtccttaaaggaacagcattaactccctcttctggaagtgtgaattcttgatatcatgtaatgaaaatggtacctcacttgtggctttcctccccccgaatccataacctctacttattatgaaaaaaaaaaaaaaacaaaaaaaaaacaccgaattccaatagaggaacattctataaaatacctaactagtattcctcaataacgtctaggtcatcaaaaacaaggaaaatctgaggaattgtcacagccaagaggagcctaaggaggcatgacaaccccatgtaatagggtatcttgaatgggaccttggagtagaaaaatattattaggtaaaactcaaggacacctgagtaatgtatgacttttggttaaaaataatgcatcaatattggttcaataattgtaagaaatgaaccatactaatgttagatgttaataacaggagaaacaacttctcaattttcctgtagttaaaactgttctagaactgaagtctattttttaaaattctcctggaaaaaagtggaaacatatgaaatatgatggacaaatgttagtaattattgaatgtgatgatggataatgagaattcattatataattctgtttttgtgtatttgaagttttctataatggaaagtttgaggctgggcacagtggctcaaacctataatcccagcactttgggaggccaagagttcaagaccagcctgggcaatgtagtgagaccccatctctaccaaaaaacagaagaattagccaggtgtggtgggcttgcacctgtagtcctagctactcaggaggctgaggtgagaggatcacttgagcccagaaggccaaggctgcagtgagccatgatgtcattgtactccagtctaggtgacagagagaaaccttgtctccaaaaataaaaaataaaaaaagtttgaacaagaaataaagaaatatggagataaggataagaagaagctatttaaagcactagagtagctgcttttttaaattatggttaaaaaaatatataataaaatttaccattttgccatttttaagtgtatagttctatgacattaagtatattcatgctgtgtaaccatcaccaccctccatctccagaactttttcatcttcccaaactaaatgctaggtctattaagcaacatctcctcactctctcctcctccccagcccctgataacctccattctacattctgtctatgaatcttactaaactaggtgaatcatgtaagtggattcatacaatatttttccttttcagtctgatttatttaatctagcttcatgtcttcaaggttcatacataatacaggaaaataatttccttccttcttctgaaaaatattccactgtatggatctaccatactttgttcatccatcgatggatgtatactctgttgcttctaccttttggcagttgtgaataatgttgttataaacatgatgtacaaatatctgcttggtctctgctttaacttcttttgggtctgtacccagaagaggaattgctggatcatatgtcaattctatgtttaattttttgaagaacaaaaagtggccgcttctacaaaacagaaattttcagattaggagatgtgggacagggaaaaattcctgtctctgaaaagttaagagttttcactataagctttgtagaaccatttttaaataatatatgataaaaatgaagtaaagtatgcaataaaactcatcttgtgctaagtactggagatacatggagggagccctcagtcctctgggggaagaacctggttatagaacagtgtgatcacaggtgcaacacagagaagactccaggggcaagcacagaaaatagccatcaagggagattctttgcacgccatgcagaagtgccctacaggaggtgacgtgggagtgaaggaggaaaatatgacattctgagttggagaattggaagattaaacttggaatgatgtcagcactgagattctgggatcatattgtacaactggccccatctcagcactaacactgtgaaatcttacctttcttatgtcttcaaattgtggccctatatttagcttctatatctttctttgactaaatctcaaaactaaaattggtcctgattccaggggaggtgtttctctgactcctctcttttgaatctcatagcctgacattttctcttcatcttgaagaccatattcaggagggaccctaggaactctgtatctcagcatgtgaggcttcaggccaaggggtgctaatttgattctgaaagatcttatctgcctccagtgccataaggtcctgatgaaatgtccagcatctttgtggaaattcaagtgtctccatacagcattatatgtcttggagattatgtatatgaaaagctttacagataggtgtgtctcagtgatgctgtgcagagtaacctgtggcctaagtcaagtcagaaaatgcttttgactctatatttctcaaaaatgtaagtcttaaaatttggctatggatgggaaaatattacataattgaaaggataaatataagtatgccaatcagccaaaaacactgcaaatgtttaatgcagatttaagttttccctcaaaaactgttaataaattaatagtgcagcttacaaatgatgaaaagagctgagacgtttaaaaaaactttccaagtgtcaggtcctggtactttacatttattctacctcctaatccttatactaggtcaaagctcattttatgtcttcaagattcagatgtaacactgggaatgagaaaggttaatataagtgatatgtccaggactatacttctagtaattatagctcactgatggagagaacattaaaatctgtttggccttcacttaaaaacaaataatatttgtgttatagaagcaagacctttttagtcacaagttaataattttaaagaaaagattcaacatgtaaatttatctggaaaggccaggggtgaggctgcctagagacatgattagattcggagatacatttgtcatcagatctctctgtacttctaaagaagatagccaatatcagcttatcagctccaactcctctcatattattctaccttaacagcttcagcagaaaaatagacatctttctcacaatgttcataaataaagaaccagagaagatgacctttggaccaatacctgttgttatggagatgtggtacagtgtgggaaactctgattggtcagggctgggtcatgttatttcctcatcccctggtccattatattatttcttaagttatttaaagtcatggctactatttttatttattttaattgacataattatacatattgatatagtacagtgtgatattttgatacatgtatacaatgtgtaataagcaaataagggtatttagcctatgcatcacatcaaacgtttaccatttctttgtgatggaaacattcaaaatcatatcaaaaagataatccaccacaatcaagtgggtttcataccagggaagaagggatggttgaacacactcaagtcaataaatgtgacacaccacataaacataattaaaaacaaaaatcacatgatcatctcaatagatgcaaaaaaaacattcaacaaaatctggcatcctttatgattaaagctctcagcaaaatcggcatacaaggaacatacctcaatgtaatcaaagccatctatgagaaacccacagccaacataatactgagtggggaaaagctgaaagcattccctctgagaactggaacaagacaatgatgcccactctcaccacttctcttcaacacagtcctgaaagtcctagccagagcagtcagacaagggaaagaaataaaggtcatccaaatcggtaaagaggaagccaaactgtcactgtttgctgatatgattgtatacctaggaaactctaaagactcctccaaaaagctcctaaaactgatacaaaaattctgcaatatttctggatacaaaattaatgtacacaaatcagtagctctcctatactccaacagtgaccaggctgagaatcaaatcaagaactcaatcccttttacgacagctgtaaaaaaaaaaaaaaaaaaacaaacttagaaatatacctagcctaaggaggtgaaagacctctacaaggaaaactacaaaactctgctgaaagaaatcacagatgacacaagcaaatggaaacacatcccatgctcacggatgggtagaatcaatattgtgaaaattaccatactaccaaaagaaatctataaattcaatgcaattctcatcaaaataccacgaacattcttcacagaactagaaaaaaaatcttaaaattcatataaaacccaaaaaaagcctgcatagcaaaagcgagactaagcaaaaagaacaaatcttgaggcatcacattacctgatttcaaactatactataaggccaaagtcaccaaaacagcatggtactggtatgaaaatgggcccatagaccaatggaacaaaatagagaacccagaaatgaacccaaatacttacagccaattgttcttcgacaaagcaaacaaaaacatcaagtggggaaaggacaccttattgaacaaatggtgctgggataattggctagccacatgtaggagaatgaaactggatcctcaactctcaccttatacaaaaatcaaccaagatggatcaagcacttaaaactaagacctgaaactatacaaattctagaagataatattgaaaaaaacctcctagacattggcttaggcaaggatttcatgaccaagaacccaaaagcaaaatgcaacaaaaacaaagataaatagctgggacccaatgaaactaaagagtgtttgcacggcaaaagaacagtcagcagagtaaacagacaacccacagagtgggagaaaatcttcacaatctatgcatctgacaaaggactaatatccagaatctacaacaaactcatacaaattagcaagaaaaagaacaaacaatctcatcaaaaagtgggctaaggacatgagtagacaattctcaaaagaagatatacagctggccaacaaacatatgaaaaaatgctcaacatcactaatgatcagggaaacgtaaatcaaaacgccaatgtgataccaccttatatctgcaagaatggccataatcaaaaaatcaaaaaataatagatgttggcatggatgtggtgaacagggaacacttcttttttttttttttttttttttttttttgagacggagtctggctctgtagcccaggctggagtgcagtggcgcaatctcggctcactgcaagctccgcctcccaggttcacaccattctcctgcctcagcctcccgagtagctgggactacaggcgtcactgtgttagccaggatggtctcgatctcctgacctcgtgatccaccctcctcggcctcccaaagtgctgggattacaggctggagccaccgtgcctggcctgaacagaaaacacttctacactgctgataggaatgtaaactagtacaaccactatggaaaacaaggtggagatttttttagagaactaaaagttgaactaccatttgatccagcaatcccacaatcccacaatgggtatctgcccagaggaaaataagtcattatatgaaaaagatacttgcacacacgtttatagcagcacaattcacaattgcaaaaatgtggaaccaacccaaatgcccatcaatcaatgagtggataaagaaactactcagccacaaaaaggaatgaattaatggcattcacagcaacctggatgcgattgaagattattattccaagtgaagtaactcaggaatggaaaaccaaacatcgtatgttctcactcttaagtgggagcaaaactatgaggatacaaaggcataagaatgacacaatggactctggggactcggggaaagggagggaagaaggtgagggacaaaaagctacaatttgggtgcagtgtgtactgcgtgggtgatgggtgcacatttgctccttttaaaatgatactattattattttgctgttgtttgagtttcttgtaaattctagctattaatcccttatcagatgaatactttgcaaatactttcattctctaagttgctgttttatctctgttgattgttttcattgctgtacaggaaatttttagtttgatgtagtcccattcatacatttttgcttctcttgcctgtgctttcaaggtcttaatcacaaaatctttcctgcgtccaacactctaaagtgttttctgtatgttttctcccagtaggttcatagttttgggtcttgcatttaagtccttaactcattttcagttgatttttgtgaatggtgagagatagcagtctagtttcatacttcctaatatggatatccagtttccccagcatcatttattgaagaaactgccctttcctcagtatatgttcttggtgattttgttaaaaataaattgagtggctgggcacggtggctcacgcctgtaatcccagcactttgggaggctgaggcagacggatcacgaggtcaggagtttgagaccagcctgaccaacatggtgaaaccccgtctctactaaaatacaaaaattagccaggcgtgatggcacacgactgtcattccaggctgaggcaggagaatcgcctgaactcagtaggtggaggttgcagtgagccgagatcgcaccactgcactccagcctgggtgacagagcgagactccgtctcaaataaaaaaaaaagaaaaaagaaattaactgtaaatatatggatttatttcggggttctctattctgtctcattggtttatgtgtccgtttttatgccaataccttgcttgccattttggttactatagctgtatattttgaagtcaggtactgtgatacttccagctttgttctttttgctcaagattgttttagctattcagggtcttttgtggttccatacaaattttaagatttctttttctatttctataaagaatgacattggtattttgataggtattgcattgaatctgtagattggtttgggtagtatggtcactttaacaatattaattctcccaatccatgataatggaatatctttcaattttttgtgtccttttctatttgtttcattagtattttatagttttcattacatacttggttaaatttattcccatgcttttttatagttactgtgaatgagatttctttcttgatttttcatcattttgagtttgcctctatggcctttattgtgtttaggtacattccatctatacctaattggttggaagtttttatcatgaagtgatattgaattttatcaaatgctttttctgcagctatagagatgataatattagttttgtctttcattccactaatatgctctatcatgtttattgatttgtatggaaagtctacagtttttttatgttgattttatattctgtaaatttactaaatttgtttatcagttctgagagttttttgatggagtctttaggtttgtgtataaataagattatgtcatctgcaaacagcaacaatttgacttcctcttttccaatttggatgccttttatttccttctcttgcctaattgctctgggtcggaccagtactatgtgtttttgttgttgtcattgctgtaatcttttaaaattttctatccatttccataggaatcagtctagtactatgttaaatttggtaaaagcaggcatccttatcttgttccaattcttagagggaaatctttcaactttttttccattatgtatgttgtcaactatcgaattgtcatatgcagcctttattgtatttaggtacatttcatctatacctagttggttgagagtttttaatcatgaagtgatgttgaattttaccaaatgctttttctgcatctagagatgatcattttatttttgtccttcattctgttgatatgatctatcacgtttattgatttgcagatatgtaaccattcttgcatccctggaacaaatcccatttgatcatggcatataatctttttgatgtgttgtggatttagtttgctactattttgttaatttttgcatctgtgtttatcagcgtgtagttttttgttgttgtatccttccctggttttgataacaaggtaatgcttgcttcctagaataaatttgaaagaactccttcccccttcaattttttggaatagtttcagatgaattggtgtcagtctctctttaaatgtttggtggaactgaacaatgaaggcatccagtactgggcttttctttgttgggagactttttattcctgattcaagctcattactcattattggtatgctcaggtttttaatttcttcttggttcattcttggtatattttatgtgtccaggttaaacttcagttgcctttataatctaatgagagctatggaccaaaattttgggtaaagcactttccgtggcagttagattttttaaaaaaacttctttcgggccgggcgcggtggctcacgcctgtaatcccagcactttgggaggccgaggcgggtggatcatgaggtcaggagatcgagaccatcctggctaacaaggtgaaaccccgtctctactaaaaatacaaaaaattagccgggcgcggtggcgggcgcctgtagtcccagctactcgggaggctgaggcaggagaatggcgtgaacccgggaagcggagcttgcagtgagccgagattgcgccactgcagtccgcagtacggcctgggcgacagagcgagactccgtctcaaaaaaaaaaaaaaaaaaaaaaaaaaaaaaaaaaaaaaaaacttctttcattgcccccaccttttttgttgttgttgtttcaagtgagttatgggtttctttttaactgaattgtataagcaaaatatctccaagtagccttgaattagtaacaaatcaatcttttgtttaccagtcttgtttgcttaattagcaaatgtggggagggaagaattttagctgtttttttttcttcacctttttctttttggcttttgcatggcacaaaaaacaaaatttttctgttgaacagggataccttctattattgctctgagatcaagattttgacctatttggtctgagagcctaacttttataaacatttatttttttttcttttatgttactaatttttcaattaagtgtttcattattgtacacagttgttagggaaacctaaatttatatttataaaaggtgtcagccaggtgcggtggttcacgcctgtaatcccagcactttgggaggccgaggcaggcagatcacaaggtcaggagattgagaccatcctggctaacacggtgaaaccccgtctctatcaaaaatacaaaaaattagccgggtgtggtggcgggcacctgtagtcccagctactcaggaagctgaggcaggagaatggcgtgaacccgggaggcggcgcttgcagtgagcccagatcaggccactgtactctagcctgggggacagagtgagaccccatctcaaaaaaaaaaaaaaaaggtgtctaggtggttgattaccatggagctattgtaatctgtaaagccattaatttcaaagcctttaaggctgttttctttccttgactgaaatgccataagcagtgagttttatctcaacacctgtagaaatgtcatcatgttcaaagtaggcagaaaaaaaaagagagagagagagagaacttctacatgttaactctataattgctggtttttaaaaataatgaccatttcagttctgaattttccttcattttgcctatctacttataaatgtgcacaagaaagttaacattgattttgaacatttcaaaccaattaatacatcattgtatttgtgtgacaacaaattccatacagaagctcttacagcactactttcagatgaaagcaagtctggattcatcgtaatagatggtagtggtgcactttttggcaccctccaaggaaacacaagagaagtcctgcaaaaactcactgtggatctcccaaagaaacacggtaaaggtcagtcagccttgcgttttgcctgtttaagaatggaaaagtgacctaacaatgttcagaaagtagcagagactgctgtgcagctgtttatttctggggacaaagggaaggtggctggtctagttttagctggatccgctgactttaaaactgaactaagtcaatctgatacgtttgatcagcggttacaatcgaaagttttaaaattagttgataggccgggcgtggtggctcatgcctgtaatcccagcactttgggaggccaaggcgggcggatcacgaggtcaggagatcgagaccatcctggctaacacggtgaaaccctgtgtctactaaaaatacaaaaacaaaattagctgggcgtggtggcgggtgcctgtggtcccagctacttgggaggctgaggcaggagaatggcgtgaacctgggaggcggacttgcagcgagcccagatcacaccactgcactcccgcctgggcaacacggcaagactcagtctcaaaaaaaagaaattagttgatatatcctatggtggtgaaaatggattcaaccaagctgttgggctatctactgaagtcctctccaaagtgaaatttattcaaaagaagaaattagtagggatacattgatgaaatcagccaggacacaggcaggtactgttttggtgttgaagatacactaaaggctttggaaatgggagctgtagaaattctaatagcctatgaaaatctgaatataatgagatatgttcttcattgccaaggcacaaaagaggagaaaattctctaactccagagcaagaaaaggataaatctcatttcacagacaaagagaccaggcaggaacatgcgcttatcaagagcatgcccctgttgaaatggtttgctaacaactataaaaaagtcggagctacattggaaattgtcacatataaatcacaagaagggtctcagtttgtgaaaggatttggtagaattggaggtctcttgtggtaccaagtggatttccaaagaatggaataccaaggaggagacgatgaatttttttaccttgatgactactaggtagtcgacatgggtccggcaaaacatgcctcactctccagcatccaacccaaggagcatactcatgatggaatccaaacagatccctgccttacaattggaacatttccagaacttaatccatgagcactggatattgaaaagaaaacagaaacaaaaccagacccaaccctacactttggtttgtcacggtgtcagcgtagcagcctacaactaagttcctaaatgccactttggactaatttaaaaaagaatcccagtttttacttttactcgatggtgaaattggctgctcttgtattttatttaaaaaatgatttttttaacctttatacaaataagcaaaaatactttaactgctgtaaaccttcaaaagttaatagaagtgagatcgtactgctttcttattttgattggagagaaattaaattgctacattttgcagtgacccatttacatggcattctcagcttagactgcataagaagaaatatatgtggtgaaatgttggaaccatttctctcttggtctctgtttaatgatgaaagagtgagctaataggaggcaatttcaacttcactccctcacgctaccccttccccctccagactggccgtttcaaggatgaaaattgcattgcaaaatcaaactgactcatgaagcatttgggccagtgcactgtttacttccatctgtttgcagacacatttgtgcccggtgtttgggagctctttgtatcaatgttccgacaagggtcccaataaccttaacctactcgaaaccagtttgggatggatatgatggggcttctgtgctattgctgggattgggagaaataaaacatgcaatttaagtggaagcaaaacaattaaaaataaaataaataaatccattgcctgattccatgtctccctccaattaccgccccatttctctgacactccttatagaataattccttagtcaattgtctcatgatgtttttaatatatcaaatggatttatggacagtgtttcaaaagccaaatacttctacaaggcttgttatgaacacagatgtccccaatctttcatgtacaccatttcctgaatcctagaggcaatctactttattctgcctaattttttgatcgttacatctgtgcctccaaatagtgtgttatagtgccgttttgtttttcactcttatgtatcatccttagtgtatagctccctttcatatacccctctcctctcaatatagttattttataattttggttagctgggtgctcactatttatattattatgaccacagaaatgctattcacagctagactaggaaatgctattcacaattagattaggaaatgctgttcacaattagattaggaaatgctattcacaaggattattttccttcctggaattgactttttaatttccctggaattaataaatgttttatcccttcatgtgcttaatttctgttgtactcattataaaatctcttccaaatttccctccaaggcctctgctatagtttgaatgtgttccccaaagttcatgtgttggaaacttgatccccaatgcagtgatattggaaagtaaggcctaatagaagctgtctgagtcatgagcgcagagccctcatgaacaaattaatatcattattatgggagtgagcccataataataatattgtcctctctcttgcccttgacccacttgccatgtgaagacacagcaagaaggctcttgccaaatgctggtggcttgatcttggattcctagcctcacaactgagaaaacaaatttctgttcttcataactgacccagactatggcattctgttatagcagcataaatgaactaagacagtctccatgaatatattcaaccatgccccgtgttctaccaacctcatctttgtgaagacacttcccttggtcctgccacacgtggactggtgcatgcacatctgggctgatttccaagatcgtcttcacctcatcctgggcatccctctgcctctctcttatgctggctctcctattgcctggatcccatgtgtccccttttttggttttctccatcgtttttgtttctcatttcatccgtgttcctaagggaacatggaaagtaaaatctgaaagcctaagcttctgaaaatgtcttcgggctaccctagcacttattccaacctggacttggtatggaattctgtattgaaaacatttttcctaggaatttccatgacattccatcaacattttttagcttctaatgttgtttttcttgccttttgatgtttttgggatttcttcttttccacccaccttctaaaatttcattgtgatgtgtcttggtgtgggtctgttttcatctactatagtaagaacttggttggggccattacaagttaaatttttgtctgtaaacttggagaaatttttttattttaaataatttctatctttccattcttttagaatttgtattattaagttgcaggaaatccttgactgatagcctagtattcgtatagtttttctgtctttcttgacattgtttttccatttttaatatttagtggtagtacaaatttactcttccaagtgatctattgaaatacttatttaaatgatcactttttgatttccaagagtgctttttggttctctgattgtatataattttataaaatcctattcatcatttataaatgccatatcttattatttcttttaggtattattgagaatagtggtagtggacctgttagatctcctggttatctgctttcatggtaccatgaacttttcttcaccacacttagctcagcagtaattttatatttctctttgtaagttctgctaaatgtgcatctccttcatgacagtgcaaacatcaaattgccagcatcttacttttgctcttcactgtatcttcagggtctagtagatcacatgattcatcagaggacttgaaatacatgctgaatgaggaaatataagtgtggttaggcagggaaatcagacttccttgatcaattgccccttgatgttctcctgagcactgtatctcatgacctcctgtcatagaacattcagggacattgaaagagttcactggcatgggatacagcgtcatatccaccaccagatggacagggaatcagtgaaagatgattccattaagagaaaattccctgggtccactccacccccaccacctgcttaacctctctgagtctccctttccctgtctatacaaagatatcacatatcgggcttctcatgggtttgcattgaagatcaaatttgactctctcagtaaaacacatggtattataccttgaggtatattaagtgttctgctactcatagctactatccctatattgattacagcatttggattgtttcaatcattttgcttttataaaccaaaattcaagaaacatccttgaacatatattttttagaatgtgtgcagttatcttcttaggaaaaattcttgaaagagaaatatatgcattgaaatgtaagtccatttatattgttaacatgtttcgcaaaagtcccctctagaaatttataccccagagttttttgttgttgttttgttttgttttgtttttgagacagagtcttgctctgtttcccaggctggagtgcggtggcacgatctcggctcactgtaagctccgcctcctgggttcacaccattctcctgcctcagcctcccaagtagctgggactacaggcgcctgccaccacgcccagctaatttttttttaatatttttagtagagacgggtttcaccgtgttagccaggatggtcttgatctcctgacctcgtgatccacctgcctcggcctcccaaagtatacccgtttttcatcagccttcatgacagtgtattttccctacctctggataatatgcttatcatttactttcacatatgccaaactgacagattttaattttcattcgcatttctaatgtcatgttctcatttttcctcatattcattaatcagagtatattgtctgatatttgatttattctttcccatattgctttctaatattattatttttctattgggatgacttaaaaatgttgaatttgactaagaaaaaaagcagctcttgacttctgacactgacagtaggtttcagtactgttagaagctgtcctactgctcaacactaggccatattattcttttcttggacataaaccatattacacaacatcagacaaggacactctgggaacatgataaaacaagacaaaacaggggcactacataatttagtataagcacagacaaaaaccaaggcactgtgtacctcacaaaataccaaacctctccccctgctggctaatatgagtgacggctgtttctttaccagccacaactttatccttgctctgctctgcatttattatgggtaagatttattgagacagtcgtagaaatgttcctgctttttgacaacaccccatctacagtcaacccctacctcattagctctccccaaaaacatccactaaaagaccaaatcctatattgcattttttctaatatcctcacgctaagatggtgtgcattctctcttgtgacaatgagtaataaaccccagttgttcagctatagatgttcctggtggtctttggctgaaagacattgaaatatgctaccttttgtctttccaattatttatgtgtctttgaatttgatcacaggcatatgtttgtatatttgtgagtctgtggttgacatagagaagttttatttttttatttatggcttttcatatttgggtcatgcttacagaatccttttctacctcacaattgtaaaacttaacatctattttcatctaggtacagatgatatgaagagagggaagtcccagagtgaagagaaacacacagatatgtttgatttggggagaaagctggggggaatgagcaagaagcaaagagttctaaggtggagttttaacatttaaaacctggtcaggtgtggtggctcacgcctgtaatcctagcacttttggagggcaaggtaggcagatcactcgaggtcaggagttcaagaccagcctggccaacatggtgtattcaccaaaaaatacaaaaactagccaggtgtggtggtgtgtgcctgtaggcccagctacttgggaggctgaggtggaagaatcacctgaacctgggaggcggaggttgcagtgagccatgattgcccaactgcaatccagcctgggtggcagaataagactctatctcaaaaatgaaaaagtttaaatcatttgcttataattttaaaatatgtctacaaagcctataagatattttatatggcaacttcaataaatactttctcttgggctaagtaatgacttatatacctccttgtgttcaccaggttatagaaaacagtaacaccaagagtctcaatgaaatattgacaaggattagctctggtgataagcatttttgaaaatgtatgaccttgagttgataaatcatgttttggtaatctatacgtacactctaattgttaaaatacatattgaactttcttgggcctgctgtattttagggatatgtctaagacccacatagccaaatccatgggttctatgtgaaggtaattttaatgtatttcaatctgggagtcacaaggtatctttttttgtgggggagattgaaaactaagagcactctagataagcactatcaaaaatggtaactactagctacacatggctatttatatttcaattaattgaataaaacttttaaaaaatcaactctttatcacactagccacattccaagtgctcaataaccacatgtaactagtggctcccatattggacagtgcagatatagatcaatttcatcatcacagaatgttctattgaacagcactactgctatagagatttttatgctcctcccaaaataaaacctaatccccagtgagatgatatttggaagtgggtttgttttagaggaagtgattatgtcatgaggtcagaactcccatgaattgaacttgtacccttataaaagagattctagaaagctgttttggcccttctgccatgggaggatgcagtgagaggacagctatgaagaagcaggccctcaccagacacagagttagctgacaccttgatattggacctcccagcctccagcactgtgagaaatatctttcttttgtttataagccacctaatctagggtatttttgttatagcaacctgatggattaagataactgctcttggtgctatgtgggcctcaagtcaagtgcattagacacatctaaaatgaaagggtgactggttgtggtgacttacgcctgtaatcccagcactttgggaggccaaagcaggaggatcgcttgagctcagaagtttgaaaccagcctggggaacatagcaagatcccatctctacaaaatattttttaaaattagctctacaaaatatataatttttaaaattagctggacatgctggcaagtgcctgtagttccaacagcttaagagtctgaggtgggaggatggcttgagccccccgagagttcgccactacagtgagccattatcatgccactgcactctagcttgggtgacactgtgagaccccatcttggaaaaaacagaaatgaaagggccaatattatttctcatagagattgcaaattcaaagtgggtcaggagtgaaatctctattttgtgcttttaggcgcaaaccattcccagctccaaaatggaaacacatttgccacctctgttcccagactaaggacactctctgcatccaatttacaggtgataggttctcttctataagagcccagggcaaggcaaacttagcgctagctaagttttgggatgcagggagtcctgctcggggagaaaaatttgggaaaatgaagaggcaaaggggccagtcaagaactctccacagcttacccagaacaggatttctcaaagtgcaatctgtggaacccttgtgggctgctgaaaccccttcatagatccacaaggttaaaagtatttttataatacaatgaagacattatttgtactaaagtaaaacttgacaagaagggaggctatggtaccaaactgaaatagtagttattatattcttaaccacttcttaattatagaagaaaaaacaggtttcacttaaatatgtcgtggttgaagtatcaaagaattattaactttattaaatctctatcccagaatccacagtttaatatatcttaaatgagtaagtgggaagtacgcataaggtatttctactacattccaaattaggatgtttgaggccaggcgcagtggctcccacctgcaattaattctagcactgtgggaggcctaggcaggtggatcatttgaggtcaggagttcaagaccagcttggccaacatggtgaaaccctgtctctactaaaaatacaaaattagccaggcatggtggtgcgcacctgtagtcccagctactagggaaactgagtcacaacaatcacttgaacccgggaggtggaggtttcagtgagccaaaatcatgccactgcactccagcctgggtaacagagcgagaccctgtcttaaaacgaaaacaaaaacaaattaaaatgtttgtgtccacaaaatcattttgtgagttgtactagtctattttttatggaatatcctttttacttgaaagaatgaatgacagaaatgattatcatttagacttgaatatttggctgacactttctcaaaaacgaacataaccctgtcccttccacataatcaactgatggtattattcccaatgataaaaggcaagctctcaagagaaaattagaatcctggggaacttgtatccaccatcataagcctgatggcttcccaatacttaacaatcttttctggtaatatctgtggtaatattaaaaaatgtgattttttgataacttgtagttaaatgtgtcaacactggaagacataatgtggtgaaattgtgtttctttttttaaaagtcatgtattatacaagaagcattcaatgtggaagtcggacctatatattttaatgtaacagcatgtgaaatagttattgatagtttcatgttccacattacaaataacctttaagaagctaacacttctatcattttagtgtagtatcaaggatgaatatccagttttctaaaaatgttattaaaaacattcctggcctagcgaggtgacttatacctgtaatcccagcattttgggaggccaaggcaggagaatcatttgagcctaggagttccacccaggagttcgaatgagacccccatctctacaaaaaataaacaaaattagctgcggtggtgtttcgtgcctgtggtcacagctgctcatgaggctgaattgggaggatcacttgagcccaggaattcgaggctgccgtgtgctatgatcacaccactacactcaagcctgggtgatagcatgagaccaaaagaaacaaacaaacaaacaaaaccccccaacaaaacccaaaacaagaacagcaacaaaaatatcattgtgtgaggatggattttttttcatacacttcaaccaaacataacagattaaccaaaataacagattaaatgaaggagaagaaaattcattaatcttctaatgagacacataagaaaaggatttacaaacatacaaaatgtaaaaagatgcactcttctcactatactgtttactttgggaaatactgactttgcataaaaatatttctaacatgcaatgcattattaatattctaaatgaataaaataatttaagtgattttagtttctaatatggtaaatattaacgtatataactcacataaaattatcttcagagtcctcactaattcctaagagcatgcagagatcctgaaaccaaaacgtttgagaaacgatgacgtaactcctagctctggattaagggagaatgtgtgacaaagagcatttggtataggaggagaagggccaggccttatcctgtctctaggactgtggcaagggctttgtgtgaccaggtcagcctaggctcaggcttaggtctggccctcagcccccatcttgttcattgttttgttttgacagaagactatgcctgttcttcttcttgtatctgagttctggtctccaagtctccaatctcctctaggacagccgtaggagttactttttctgtcattgtcctcacaagccctggggtggcccctgcacacaggagtctctgtggtatcaagagaccaatttttagacccacccagctcttgtccttccagggctgtttcctggactattcttcgcatcttttccccaatctttttcaggaaatcaaattctggaattagagatcatatctcggtttctcaccttagataaactcctgttaggtttctaacaggaatttatttttggctcacctaccctctctccctgcctttggctgtaataatcctagtgctggctcaaatccaaactcatggatgtctagactctaatttaattcacagttggttggaaaatagggtccataagcctaggatcatttttttttttctgaaaagggaactataattgtctgctgtggtatatgaggattggtgtgggagggaggcgagaacagcatttgtgagaaaagtacaggcagcattgatgtcaacatgagtggttgtttcactgtagctgccacaaaacagcatgtggtctgcagctacattaataaagatactgtttctagaatagggaggtgctgtacactggtcattcatttagccaatatttgttgagtgctggctgtatgaaatgctagttttacatctggaaactaaaaacaggcaaaaattgctggccttgaggggcacatgttttagtgggaaaacacagactatgtactataagcagagtaaataaggaaagtgtttctgtcaaaaggtgctgaggggtgtgaggcaggtgatccagattgtgggtgtgtggggacagggaagatggctgttttactagggtggtctatggtctcactgggaatgtgaccttaagagaaaagatgaattatctatgaggacgtctggggcaggttctttccaggcaggggaacccccagtgcaaaggcaccagaacaggagcacatctgggttgtgggaggagttgagggggctcagatagctgcagcagtcattgatataaggtcagagatttggggagatcatgtaggcttgaggatactggaagggttctgactttgctctgagtgagatgggggagacacaaacagctgtcagcagagtagagacttggcacatcttttaaaaggatcatcctggctgctatgctgagaacagaattgagagatgaggggtgagtgagaaagtgggaaaactgtaggaaactagtgcagtatttcagattagcaactctggttgctttgcctggggtgtgagcagagaaaagagtgggaagtgattggatttcagacacattctcaatatggacttcacagtacttcctaatagattaagtctggggtatgaaaaagaggagtcaaagaggaaccccaaaatttcagactgtgcaagtagaaaaatgaagttgttgtcagcacagatggggaaaattctgaaaggggcatatttgaggagggggcactataggcattcaatttaggaaatgttgaatctcagatgtcagacattcaagtgaggttgttgtgttggcagatggatatgcaagttggaaatgcaggagaaatgtctgggctgggaaaatagatttaggagttaatgccatattaatgatatttaaagcatagagcatgcatgagtcgccaagggaaagatggctatagaagagaaaaaggacatggactgaaccctggaccttcagtgctaagggatttcatcagaacacactctgacagcagactgcacagttctaacaccacatctagaaagtaagtaaatctgagaatctcaaattttagtgtgcgtaggaatcacctggacaactttctaagattcaggtggtctggagttgagaatgagattctgtgtttataaaaaagttgaggcagacactgatggtcttcagatcacgcttttagtagcaagaatgtagaccaggattcccaggtggctgtgcatcagcctcacctgtggcttgttattcctgggatccatgttccacttctgagatggtgggtatggggaaaggcctgagtatttttgtaaaaaatctacaaggaatcctggtgatcagccagattgggaaccactgaggtcagtgatcaacagtgcctagggtgggaaagggtcttaagtccacatttaaatgctattttttctaatttaaacataaaggacttctatctgtctatctatctatcatctatcttcattaggctggtgtttattttattttgggaaggtctgtgagaataggcttaaagctacatagctagaagcagcatctataatcccatcctaggtggagtctcacataggaatcactgcccctgatgctgggcacagatgtcactgttcataccaatgacactctaaagctagacactggaccttgcagatagaactgctatcacgactgctcctggcaactggacattgctgctgcaactcacaccacacttactaaaatgtgtgcacagtaccagcttatgtcaccaggctgagtcagaatccagcaagtggttatctgcctggtggaacctaagcctcatcccatatccagctgccagaatatttggaaaagtgagtttttctttcgtggaagaagttggtgtctgcttcctacaatgactctttaagtatgaaattctttaagtatgaaatcatactctttaagtatgaaattctccctaacatggagagggttcaggtgctgggacacaggaagatagagtggaaaaagaatgaaaaaaaaagtcaattcctagagcagtaatctgagactagaaccttatctggtatatcatagacacttgggttttgctgaatgaatcagtgactaattaattacaactttcaatttatttccttgatagtctgttatgaagtacaactttttcctgatcagtttatactcagataagtagagtggcactgtgggatggtgaaatgattgctcaaaacttatctcttgttaggattttttaaaatctagatgtctaagacttcagaggacctgtgtatacactaagattttatactaatatttatatttctttgtatatgcacatattttctggaaagaatatctgtgacatttatgtttttgtaaccctattttaggaaaccctctctcaaaccacattttccctctgctctcataccacaacaatcatcaacacagaagacttctgtgaccaaagatgtgggggtttttccccacacaccaagcagtggacaccagctgggtatcctccagttcaatgtcaacactgtctacctggagatagcatcatatcccacagattgggggcttagtccccaagactactccacatcagacaccaatcgcagaagttcccaccacccactctgggcttcactaatttgctggagtagctcacagaattcagggaaacatttatgtttactagtttattataaaggatattacaaaggatacagatgaaaatacgtgtagggtgaggtatcagggaaggagcatggagcttccatgcccttcctgggcacaccaacctccaaaaacctccacttgttcagctacctggaagctccctgaacccagttctcctgggtttttatggaagcttcgtgacaccagcattccttctcccaatgtatagtgtgggaccctctccagagagggtcttaagacccataatcagaaaggcagaagattagagtcctgccttggggcaggtgaaatgaggccagaagagagattctgattcctgaggcctgccgaggccgaacacacccaatattattacaaaagaccgaaacaagggaatataggagctaggaaccaggaactgtggccaaaaaccaatctataacaccacacacccccactgtcttagtccactcaggctgctataacagaataccttagactgggtggcttataaacaacataaaagtatttctcacagttatggaggctggtaagtccaagagcaaggtgttggttaatttcatgtctgatgaaggcccctttcctgtttcataaacgtatatcttctccaagtggcctcacatggcagaaaggtgaagagaactgcctggggtctttctgataaaggcagtgatcccattcatgggggctctgcattcataacctaatcacctccaaaaggccccacctctaagtatcatcacactggggattaagttttaaacataggaatttgggtgggggattggagacacaaacatcagtctagagcatccataaaagtctaaaaaattatcctaggtttgtcaccatgctactcaaactctgatctatgaatagctgatatcaaaccatttcttcacaaactctcccaaaaaggagaaaggaacactgcccaacatattctataaggtatgttctataaggctggtaccaaaagcagacaaaacaatcacaaaaaaactacagatcgctattcatgaatatagatgtgaaaatcttcaagaaaatactagcaaacaacccagcaatgtacaaaaataattatacaccatgacaaagtgagatttatcctaggaatgcaagatgggtttaatatccaaaaatcaattaatgtaatatattatatcaatagaataaaaacccacaattatctcaatagatgcagaaaaaggttttgatcaaattcgatactctttcataatagaaacagtcaacaggtgggcacattggcatgtgtctatagtcccagctactcaaggagactgaggaaagagaatcacttgaggccagaagttcgagggcatcttgggcgatgtgttgagaccatgttactttaaaaaaaaaagagtcaacaaactgggaattgaaaggaactttctcagccggataaagggcatctataaaaaagctacagctaacatcatactcgtattagtccatttatgcattgctttaaagaaatacatgaaactggataatttataaagaaaagaggtttaattggctaaaggttctgcaggctatacaggtttctgctcctggggaggcctcaggaaacacaataatggtggaaggtgaatgggaagttagtacatcttacatggctgaagcaggaagaagagagaagggggaggtggcacacatgtttaaaaagccaaatctcactacaaaatctcaacgaaaattcactatcatgagaacagcaagggggaagtccacccccatgacccaatcacctcccaccacacccttcctccaacactggggactacagtttgacataagatttgggcgggtacacaaatccaaaccacatcaatatttaatggtgaaagactggtcgctttcctcctaagatcagcaattaaaacaagaatatccactcccactatgtctattcaacattaccaaaggttctagctaagataattagacaagaaaaaagcaataaagtatattcagattggaaagaaagaagtaaaactatattcacagatgacatgatcttttatataaaaaaatgctaaatgatccattaaagagctattagaactactaacttcagcaaggataaaggatataacaccagtatacaaaaatcaattgtatttctaaacccttgcaatgacaaatccagaaatgaaattaagaaaacaattccatttgtaatagctttaaaggaacaaaatacttagaagcaaatttaacaaaagaagtgcaactcaaacatcaatgaaagaaattaaaaatctaaataaatggggtaaagttcatggattagatttaatataactcaatgattatatttccaaactgatagattcagcacaatccctatcagattcctaaatgacttcttcgtagaaatttgcaaactaattgtaaatttataaagaaattaaagggacgcagactacgcaaacaatcttgaaaaaaagaacaaagggccaggcacagtggctcatgcctgtaatcaatcgcagcactttgggaggccgaggcaggaggattgcttgaggccagaagttcaagaccagcctgggcaacacagcaagatcctgtctctacaaaaaataaaaattagcggggcatggtggtacacacctgtcatcccagctacttgggaggctgaggcagggggattgctttagcctagaaggttgaggctgcagtgagccatgattatgccactgcactacagtgtgggttacagggtaagaaactgtctctaaaaaataaaaagaagaaaagaacaaagtagaactcattctttccagtttcaaaacatcgcataaagtaatggtaatcaagacagtgtggtacttgcataagatagacatagatcaatagaatagaactgaaattcagaaataaaaccatgtgtctactgtcaactgattttcagcaagggtgctgagcacattcaacgggggaaagcacagtcttttcaacaaatggtactggggaaacttgatagccacatacaaaatgatggagtggaccttatggtggttgaagtgtgtactccgaaaggtttgtctaagacctgaccaccagtacctgtgaacgtgaacttatttagaaatggtgtctttgtatatgaaattaagttcaggttcccaagaaaagatcatcctggatttagggtgggacctaaatctagtgactggtgtcttaataaaagagaaggagatatgacataaacagagaagagacacaggcaagaatgccatgtgaagatgaaggcaaagatttcagtgatgtatctccaagccaatggagcaacaactaccaacagctaccagaagttaggaaagaatcatggaatgaactttcccccagagcctccagaagaaactaatcctgccaacacctggatttcaaacttctggcctccagaactgtgacagaatacatgtttgctgttttaagccatcaaatcttggcaatgtgttacacaaggtctaagaaactaatacaggcctttacttcacactatatacaaaaataagctcaaaatggaagaaagatctaaatgttagtggtgaaattacaaaattcttggaggaaaacctaggtgataaatctttatgaactggccgggtgcggtggctcatgcctgtaatcccagcactttgggaggccgaggcaggtggatcacaaggtcaggagtttgagaccagcctgaccaacatggtgaaactccgtctctactaaaaatataaaaattagccgggtgtggtggtgcacacctataatcccagctactcagaaggctgaggcaggagaatggcttgaacccaggaggcagaggttgcagtgagccgagatcacaccactccactccagcctgggcaacagagtgagactccgtctcaaatatatatatatatatatatatatatatatatttatgaactcaggttggacaatggattcttagatattatgccaaagcacaaacaaaagatattagataatattgagaaaaattagatgtcatcaaaattaaaatgtttatgcttcaaaggacactatcaagaaagtgatccacaatatatacatatatcaaaacatcacattgtaccccatatgtgtattatttactaattaacagtaaacatttagatcaaaaaattaaaatagttttaaaaattaagaatttttttaaaagtgaaaaaaacccacaggaaaggagaaaagatttgcaaatcatacatttaacaagagatgtttctagaatatataacaatctcctacaacttaattgcaaaacacacataatcccaattttaaaatgagcaaaggagtccgagcgcagtggctcacgcctgtaatctcagcactttgggaggctgaagtgggtggatcacttgaggtcaggagttcgagatcagcctcaccaacatggtaaaaccctgcctccactaaaaatacaaaaattagctgggtgtggtggcacacacctgtagtcccagctacttgggaggctgggacacaagaatcgcttgaacccaagagacggaggttgcagtaagccaagatcgcaccactccactccagcctggatgacagagcaagactccgtctctaaataaataaataaaaatagaatgagcaaaagatatgaacagtcatttccctaaagaagatatacaaatagccaataagttcataaaaaagatgatcgacattattagggaaatgcaatttaaaaccacagtgaaggctgggcatggtggctcacacctgtaattccagcactttgggaggccaaggtgggtggatcgcaaggtcaggagttccagaccagcctggccaacatggtgaaaccccatctctactaaaaatagaaaaaattagctgggcatggtggcaggtacctgtaatcccagctacttgggaggctgaggcaggagaattgcttgaacctgggaggcagaggttgcagtgagccgagaccacaccactgcactccagcctgggcaacagagcgagactctgtctaaaacacacacacgcacgcgcgcgcacacacacacacacacacacacgagataccacttcccagccaaagaatggctagaatcaaaacatcagataataagtattgttaaggatatgcaggaatgagaaccctcagacactgctggcaggaatgtgtaattatgtagtcactttggaaggagtcaggctgtggctcaactgattaaaaatgaagataccatacgactcacccattcttaggtatatgtccaagagaaataaaaatgtgtcacacaaaaatttgtaaatgaacattcatagatgcattatttgtattagccaaaagacagaaacaatccagatgtctataaaccgataaataaacaaatgtgatacatctatggaatacagtattatttggccataaaaagcaatgaaatactgatacatgctataatataaatgacacttggaaacattaagtgaaagaaactagtcacaaaagaccatatatgattatatttacatatgaattttccaaaataggcaaatccatacaggtaggacatagattaactcttgcttagggtttggggtgatggggaagggggaataagagagtaatagctatagggcatggggtttctttttcaggcgatgataatattctaaaattgaatgcagtgatggttgcacatatttgggaatatactttaaaactttgattgcatacatactttatttttttccagatttattgaagtataattgacaaataaaaattgtacagtgtgactttttatttgtacataatatttgcacatatttatggggtacatgtgatattttgatacacacatagtatctaataatgaagttagggtacataggatatccgtcacctcaagcatttatttctctgtgttgggaacattacaagtcttctagctattttgaaatacacaatatattgttgttaattatagtcaccctactgtgctatcaaacactagaacttattccttctatctgactgtacgttcgtacccattaacctacctctcttcatcacccccctcacacacccacaaacacacacacacacacacacacacacacccttcccagcctctggatactatctttctgctgtttacctcgattagatcaaccttttaaagctcgcacatgagtgagaacatgcaatatttgtctttctgtgcctggcttatttcatttaatatcagaacctccagttctgtccatgttagtggaaatgacaagattccattctttttatagctaaatagtattccattgtgtatatatgccgtatctttttaatccattcatccattgatggacagttaggttgattccctgtctttgctattgtaaatagtaccacagtaaacatgggggtgccagtatccctttgatgtatcgatttccttacctttggataaatacccagtggtggtattgctggatcacacagatctattttcagttttctaagaaatctccatactgttttccatagtggctgtactaattcaccttcccaccaaccgtgtgtaagagtttgtctttatatcctagctaccatttttgtctttttaataatagctattctagctagggtaagatgatatattattgtggtttgctttaaatttccctgataattagtgatgttgagcatctttttcacatacatgttggccatttgtatttcttaagaaatttctattcagatcccttgaccatttttaaggggattttttttttttttttttttttttttttttttactgttgaattgtgttccttgtacactctggatattagtcccctgttggataatttgaaaatattgttcccatctacagttggtctcttcactctgttgttttctttgctgtgcagatttttagtttaatatagtcccacctgcctattttttgttgttgttgcctatgcttttgatgtcttaaccataaaatctttgcctagaccaatgttcttgagcatttcccctatattctcttttagtagtttcatagtttcggatctatcatttaagcctttaatccatttttggttgattttttaatatggtaagagatatgagcctagctgcaatcttctgcatatggatatccagttttcccagcaccatttattgaaaagggtgtcctttcttggtgcctttgttgaaagtcagttggctgtaagtatatgaaattatttctgggttctctattctttccattggtctatgtgtctgttttaggccggtaccatgatgatttggtttctactataacagttacaaagctattactatagcttaactattggatggggctcttttgtggttccatatgaattttttttatttttgagatagggtctcactttgtcacccaggctgcaacacagtggcgcaataccagctcactgcagccttaacctcctgaggttcaagcgatcctcctgcctcagccccctaagtagctgggactacatgcacatgccaccacacccagctaatttttgtaatttttgtagacatttcaccaggaacaaatagaaaacttgaacagaccaacaatgagtaataagactgaatcagtaattaaaagtgtctcaataaagaaaagcccaggaccagatggctttcctgtcaaattctaccatacatacaaagaaaaattaataccaatacttctcaaaatatttaaaaaaaactgaagaggaaggaattattcttaactcattttatgaagcctgcattgccctgataccaaaagcagagaagaatacaaaaaaaaagaaaattacaggccaatcttcctagtgaaaatatacacaaaaatcctgaacaaaattttagcaaactgaatccaacaacatatcaaaaatataccacaattaattgggattcatcccagggatacaagagtggttcaacacacacaaatcaacagacattaacattttttaatcttatttgaaaaggtggataaaactgaatttggaattggaagatttgttttgggtccccactctgccatttccaaactcagtactctatcagaactaagtcacagggtgcttgagggctcagaagcttttgtccagcagacaagaaggaactgttattacacagcctttgaccctctagggactccagcaacctcgtactgaaaggagactccttgtctccttctctggggacccttttgttcagaaataaaactttcgtgctgcaggtgccttgaggagacgacatgtgggtgatcttttctagaaggcagtggagtgaaagttttgggaaaagtgacagaaagagaaacaaatcctgtactggaagctcactgaaaaccaactaagtaaacaaatattttagtacctcaactgaaatataagcataaacagaggttgactatgattgtacctggacaagatgagtaaaaagctaaagtggtctgttatcagctatttatgtattttgggcctgtctccagcagttaacaaatgtcctttctttcaacaaatatctattaagaggctaacatgtgccagactctacagaacaggcttacaggcataatgccacaaaggaacagaaatctaacaggcttcaagatcaggcctgtcaaataaatgtaccacaatttatatatcatacatatatctagtacacagtcaccagaacataagattaaacatgttaatgtttatctaagtatcatttttaaaagaaaaataaaacaaaaactggaaacaactaaatgacatcaacagaatatataattaagttgtggcatattcatgtcatggaaatgaactacagtgtcacacatcaacatggatgaatccaaaaataataatgagcaaaagtagtcagtcatatacagtataattctatttatataaaggctataaataagcaactgttagggatacacagacagtaaaatctataaaagctaggtgacagttatacaaaattcaggatagtggttgcctctggctgcaggggagagagatatgaatgagagcatacgaggctcctgggatgtagtaatgttccatttctcagtctgagcaacgggcacctggacatttattattgttcttctaaatatacattttcatttgtgtattgtatattctatttcacattaaaaagaaaaaagaccaaaaaaaaaaacattaagtgtgactcaagatttaagcagacacagtgcaaagaaatgaaaaggtggatataatttgaggtagatgatggatgcaggtttggacaaactgagttcctgaaacatagacttttattcttagccgtattaggtgtgaaattgccctgagagcaccagttgcttttatgctagatttggaggggaaagagggcagttgaactcagcaatttatgtgtccagcactgaaaaccttcatggtaaacaattactaataggttatatgttaggttacttttcagtcccactcagctcaaagggcttgtcattaccctactgatttgcacttctaagtcttctgcctgttgcattctgatgatccatttctatgcaaaacatagaatctaaagctgagacatagcaatagaggaccagagaacagacacagcaacgaagtttccatgaggcaaatcaggagggtaggaatgagattttgatgtgcatcctggccaaattccagaactagcaaagagaggtcagttcctaattccaatcaaagcaaattcagtcatcttattttcacacagaagtggtctacattgatttttaaatctctttaagggattagggagcctctgaaatgcaaaggaaactaaactgatagtaatgtaaaatgaacagtgacctatcataccagcaaacactgtcaaaaacagaaagctaatggtgggactggaatctagaacacagaagttatgtttatccagtgctacactgtgcaacagggtagtcacttgccacatgtggcaatttaaatttaaatgaaattcaattaaacattccattccacagctgcaccagccacattttaaatgcctcaacagccacgtgtagcaagggctactgtactgaggagcacagacacagaacatttgtatcagtggctgacctagcagtatccagggtaaagggtgttctgctagtaaagcaaggtgggcatcagaattatcacaacttaagcataatattcctgagggcatctatttccatttatttgcttctctgcttaccaactctgaacccctgctttcccaactttctggtatctgggaagaaaataaactgactagaaaacacaaatttcattctgcttgacaactgtaattctcactaaatttataaatttgctttctgatttatcaatgagtgccaaaaacatgagtttgagaaaggctgagtttgattatccctgagtggatccaagcattaggaaggtcttgcttaagtgggtgataggaagtgacaaaaaaagctggaagaaacatgacagactataatactcccttccctaaccttcctccttttcaccctgctcacctgggccaggttagaatccgtcctttgtaaagcaccctgtacctttctattgtaacctttatttactacattatctgtttatagagtgatctatgccattagttgaaaattattcaagggcagagacttctctttattcaccttcagtaactaacataatgcctagcatgtaggaggctctcaaaattaagtttctcattcaaataaattgtacagagcaagttacacttttaggggctggctagtagttatctgatgaaggtatgatattaaagaccatatactaaactatagcaatctcatcaaaataaccttggagggctgggaacagggagaataagagaagtagattagaacaattctttattcaccaccattgcccaaccccggtctttccaagtggggaaactaacatttatgaaacaactaatacatacctacacttcacaaaaaaaacagtccttccataaatgccatcaaatattattgccattttaaagatgaggacactgaacactagaaaggatatgcaacttgaacaaatgcaagtcaactaaaaaagttaagctaattttcaagtgcagaactatctatctgtatctgatacaaatgggaatattcactgaaccctggagagaacgagcatttgaaaaaaaaaagggttcacttaagagatatgattttatcataacagcattgaaactttaatctcttatttttcctatttgacttcttaaaaagggtggcattgccaagaattttctttgatatggtttcacaattgtattcaccttctctccattctgagacttatccataagaatactcactttaatccgacttctactgcatggttggaaaagaagatacgcaataactctttcaaactcctttatctcttttactctctcatgcttctcatatgtaagtagctggctctggcttcttctcaagattctctccttgagtctttgttctgcaagttctctccctcgaatcatgcgttcctggtgatccttagtctgcatctgttccctctcatttacctgctttcttctctgtgcgttctggatgccatgcccttctggcataatttttggtaattttgtttcattggggggttgtagtacttgtctaaatggtttgttcttaaattctccagcctttcctgtttgatgtatgtgcctttctatgtgtttcatctctctctcaggtaccaaacagtactgttttagtccttctacgctctgggttgttttctcctccatttttttctagatttcattgcctgtctcttctttcatcatttccactattattttattataataagactctgctttggcaagccagtagtcaagagaaacagcttgctccctacagagtatttcacactcctcctgatatttctgcattatcaactgtcttgctgctgttgtatgcacaccacctagattctgtcaaaatgaagtcagaaatttataatgtgatcatctttttcctttgaacacatttaaacaggagccaagcccaccctccctaatgacaccaggaaaagctacatgctctttactttagcttagttgttattttattcccatcactcccaggtgagcctgggagctctgaaagtattaagtactcaccaccacaaatcagtaactaggtttaaaaatgtatggtgttggaagtttccaaaaatgatactttgttttgcaactgtggatatagctgggtaacatttgccagtgtagacatactacctgaatgtgtcacttgggcagaaggattttaaacctaagattccttctctgtgtagttccaaactgtatgatgtgaagataatttacttaccaagatctttttttccagtggagactgctgacctgcagcaatcctaggatctttagatgatgtaccccaggccaatctggaagataaaaaaggcaaggtagattcaaatgtaggaggtgtcagaacaaatctgctaatagggaggactacagcagggccatttcccccatgggaaaccactgcattcctatggtagaaaataatgaatgctcttttaataagaggatctttcctttcatatgaacaagcatacttttcctgtggactcagcgtgaaccactgtgaatctcgtattggggattgtgagtgggaagagacatgctccttggtgaggtgttgtccaagtacatctatgtcagtctgctcagtcctcaagcctcctttgtgttctgagacgattgtaggttctagttttctagacgattctaggtttctagttttctcttcctgcagtttcttgatccgggccctctctgactctatcagcacatacagcatttctgccctctaatcttttgttctgaaattctgttatttgactgctcagccctctgcttgcctgactaacaatgccaatcatccttcactctaaatccattatgagactattccctgttgaacccctcaggatggcaatttgtggttactctgggtttatttatagaggaggctgatggcaacacaaatgaaaactatcatcttttatgtgtcatccctggtctagcctgagtttactgtgatgtcgtatttaagccactgaggatgcctggcatttcctctgtatgtcttttataccatttagagttcaaaggatggtctttacagtctgacagagctagatctgaaatctaattctaccacttcctaggtgtgtgactcagggcaagtaacttctgtcagctttctcatctataaaatggagatgtaagacaaaaatctgcctctcagggttataaagaacaaatatgaattagatgtaaagagcttggtaagttctcaataaattctatctatctgtccttcacaggtcaagctcctgattataaagtctttccagtctactctgtcagtgatcttcccttcctctaaatacttgacatattttaattctacaactcatttgaaaattaatcgtggtttacactgtgatatctgtattcacatatcacttttaacattttgatgctgaaatttaggctcataaggaatgaaaactgtaatttatatctacaaatatgatgcctctatattgttggaaaggatctgatatcaaatatttggtctcactgacctcttaggaacattcttatttgtctacgtaagcttattttgagattgtaaacgtatgatcatcttacttttacttctctgtacatggcttctagcacaatacttaacattagagtctgtgatcccaagttctcaaaattaatgatttgctgattgctgatgatccttgacacataatatctgagcatcttttttaaatatctgccataacattgtatctatttttattaagccatttcccagtcttccttgaagtttacagatatgtttgctttatatgcatgttctgggctctcacattttgtacctactagcacagttttattatattctaattattcattcatgttccttgaggtcagagaacacagatttcaactttgcaggctcagcctcagctcaaaacctggcatagttgctcaataaatctttactgattagactgtgagcttttgttgggaaaaggatatgccttttaatgctttgttcctttactgcaattcacaggggatgttggctgtttttcaaattaaaaacagaaaactgaggagggtagaatttcaagttccattttcaaaggagacacacagataagtgagaataaaaactgtctacgacaatcagctcaacaacacgtctccctttgtaagacagaataacaagcaatttcacagttaagtgatagggcttgtcactcttcagcagtttgctgagttttaaccctttcactatggcgttctctccattattacagagaaaggcagatgggagcctctcccagcgaaaagactacagcttgtgtccttcataggagaaaacagtgatggctccagaacttttatatgaatgaacttagcacagctatcagagtggatggtggtgggagggctagcaggaaactagtaaacaactacaagctgccccttcagggaaagtttctacttggaatataagttacagattaatgaaaatagaaagatttcccaaagatacttattctcatgttttataaaagatcagggaaatgtcagctgtccacttaacggatgacataatgaattaagagttcgataggcggcaggcacaactaaaagccaaactcgacctaagtcttatgaaatcctacttaatgagctttcttgactactgctagcctcacttatctggcaggagtcgaaggagaggaagccccaagctcctctgttccaccacctccaaagtcctgaaccccttctcaagtgtaccacttcatccctgcttcctttcgtcccgtgggactaagcattcctcgggccttcactctcaccacttgctgtccctcaaaaagccgactcacccctttccaagcgcagtgaaccgtccgcaaagcacgaggccggttgcgagctgcagaaagcccacgctcgccagcgggacccaaggaacgctagaactatacgtcccagaacacttagctttgtttttaactacggtgcagccgcaaaagggaaataccggctcaggacccaggggagttgtagttctctaatccaaagaaatcattatttggcaacgtacggttttcagggggatataccccgcgactgcgttcctgtaggatgtgagacaaagagaataaatatcccaggattgggtgctggtgggaaaatctgctggaagcgcagcattggttaccaattttgtgctcaacctctcagtaccagggtgaaagtggagacgcaatctcccttggaagacgttagtctccatctctaacgctcccgagacacggttcgcaattaattatgacgtcacagccaatcgtcaacgcgaaagcctgacgctctagccggctctatctcgctgccccgccgcgggcgcagagctggcgctctagcccacggagttggttaactcctctcaccggcccctggaaagggttccaagtcctttagtacccgacgctgtctgggaattccgggcgtttcggctccttggtcgcagaggcaggaggcgtgcgtggcaggagggttcgggttatatactcctaggtcctgggacagaatagttacgacctctgggacaggaactcttctctcttttgttaataaacttccaactccctcctcagacccgaccgcatgtctgtcatggacctcgccaatacttgctccagctttcagtcggacctggatttctgttcagattgcggctcggtcctgcctctgcccggggctcaggatacggtcacctgtattcgctgtggcttcaacatcaacgttcggggtgagaggcttgtacgcaggggtcctggcggagggcgcagggtcggaagcttggggaactcaagatcggttgggttgaggaggggatcctagagcaggacatcaggcggttgtacatttggtctagcgatgaaaactgagggaaaggatgtagggcctcctggcctaaccagccaggggaaaggggaggtttccggtgtcagctgtctctggttgtctccataaccagttcttacttgcctgtgcagactttgaggggaaggttgtgaagacttcggttgtgttccaccaactggggacagccatgcctatgtcggtggaggaagggcctgagtgccagggacctgtggtaagctaatgagatcaagaactggctccataaggtgggtaggaaagaaatggaggagtgattgcaaagctctggagagttttgtgcccaattccaagagggaaaagagatgtaaaccatcgacgtttgagaggcgtgatcgcctgattcctgtgggaagtaaggggatatgaccaggcctccctaacccaccagtttcttcccaggttgacaggcgctgccctcgatgtggtcatgaaggaatggcataccacaccagacagatgcgttcagccgatgaagggcaaactgtcttctacacctgtaccaactgcaagtgggtattctttcccctccctctgctcagtctgtttgctaactaaacaaatccagtgatttatttttttgtacgaaatggccgtttcccttggtcccatcccttatttctgtgcagttctggtaatagggagatttgtagttgttttttatttttttaagttacacttttttaaacctttttataaccagtgaaataaaccttttaggattttttttttttttttttttttttgacagggtgtcgctctgtcacctagcctggagtgcagcgaggcaatcttggctcactgcaacctccgcctcctgggctcaggtaatcctcccacctcagcctccaaagtagctgggaccacagacacatgccaccacgcctggctttttttttttttttttttttttttttgtatttttagtagagatggggtttctctatgtttcccaggctggtcttgaacttctgagctcaagtgatccacccacctcagcatcccaaagtgctgggattacaggcatgagccaccccgcctgacctacttttaggatatttaaaaggaaatgaagaaaaaaaaaacaacataagaagcaggtattgtttagtggtcagcatcttatactgcagtcttcaaccgcagtcaaggtagctttctttggagagaattagtcacacatgacttagagaacatgggctttctgaatgcttttaagacctcatttttgtctttggtgttctgcagtcactatagtatatcaaaatacgattttcttttattctgtttgggatttgttggactttctgaaactgagagtggacttttttttcatcaaccttggaaaattatcagccatcatctcttttaatattctctttcccccatgttctcagtcctcacattctggacctcgaattagttactagaaagaggtttctctcttctgtcctccatttctctcaccttcttttcatattttcaattgctgttctctttatgccaccttctgagtaatttcttcaggtccctcttccatgtcactaattctgtcttcagtttatttcaagtattattattttttactattgttattattttgagttctatttaattacttttcaaatctccttaatttttaaataattatcagttctttaatcatattttaaattgttccttttattattctttaaatatatatttaaaatattaaatatggttattatattctatgtctcataattctgatatctgcggattttgtgtgtctgatgctgctgtcttttgtttctgctgtctctctcatagtgctttttttctttgttttgtgatttttgactataaattcgagttttttagaacttgaactgtaggaattctttgaggccttgggcgagtgctgtattctcagcatttgtgtttcttttctaggtgccttgaagcactatcaagctggaattactttaaataaattcttggcttcatgttttttggagcagacagatagtatgaatttgagctgcaaatccatgtaagggctagcttacagttagaaattctcaggagagagttttctctctttctacctactgagacagtcaaattccccttctatagagttgaattttttcttttcttgttcacttttacaagaaagggcagccttttgcagttcccaaatttatgcacgggatctcctatcagaccttatacattttgtccctcatttcctatgcttccagtgactgtcaaaacagtataaagggcaccatagtgtcactgtcacgtttcatagggacattagttttaacttccctgtctggatttctggttttacagaacttttaaccagtgtgcagattgcctttactttcttgccatctcatcaaaggattaaaaatattcatagtcagatatatcttttaaaagtatttttttcctatcactggttgtcattttaccaaaaaaaaaaaaattttttttaaataaaaagaagattttttttcccagcgtgtggcttgcctattttcttaaccctctttaaatgagcagaagttttaagtttttataaggttcagcttatccttttttttttcttttacagctagtgctttctgtgtcctaagaaatctttgctttgaggttataactcattggatatatttttaatcccagaatttttagttgtcttggaattagaattggaagtttgtttaggggagccagtcctcaatgatgtcataaataaaagtccttccttgattatttgattgcatatcttatcttatactactagaaactcatcttttggtgaatataacaagtcctttctttcctcataggttccaggagaaggaagactcttgacctttttcctgggcaactctacagtccctccctcctttcggaaggtgaaggatactgggtttttagatgccttgtccatcctgtctggttgcaatgttttgctcccagaagagaatcagatcatcatgtggggattaccattgttcctggagtactcctacccttagttgaatttccttattaaagttatatttttctataagaccctgacatatgtatgttacttataatctgtcttattccaaaaggaatttaaatgagtttccagagatatatttatatgaaaaagaaaagggggaaaaattaggacaaaaaagtagagtcaggaatgaggctaatataaacaaaaagcaattgtaagtattgccatactatttaaatctatttggttcctgagtttaggttaagaaaaactaggaatttggatagtgagacatttaacagaaattttaaccagatctctttagcatataaatttggacaacaaaaaatctgatactaagtaatgccactaagtgatcactataggtgagtattttattagtattgagataaatacaatacacagttgacccttgaacaacacaggtttgaactgcttgagtctacatatatgtggattttcttctacttctgagacccataagatagcagcacatttaagccctccttttcctcctcctgagcctactcaacatgaaaatgtgatccacttctacttaatgaatagtaaatatattttcttttccttatgattttcttaataatgttttctctagcttacttgattgtaagattatatgtattataagtatataatacatatacaaaatatgtgttaatcaacggtttatgttattggtaaggcatctggtcaacagtaaagttttgggggagtcaaaagttatatatggatttttggctgttcagagggtcagcaccccttacccccatgttgttcaaggatgaattgtatatctattataatagattcttatatagaaagaaagaaaaaagtaaagtcacaaggaatcctactccacagagataaccaaattatactgtatatctgtgcttgtgtatatgtatgtggctctgtatatgtgtgttgctatatatgtgtttggtttttttaatggactagacatgctgaactatatcttgcttttttctgtttgaactaaaaactttcaaggggaacaaatgcatactcaggtcccgcattccttggctcaaatagtgatcaaggggttactgtaataattatcatataattgtgtggccctttatatatattcagagctctcaaacatagctatcttgtttgacccccacagcaacctggagaatgggcagggcagtcttccccactgtacgtttgaactgttctggcagttgactttcctgacccactcctgaaatctgaaacaaacctgttcatgtttctaccctactttaagcctttctctggcccataacagtgattggattaagcttaatttcttagcaaagcatacaggttcttccatataaccactgcctacctgtcaagcttcatctggcactccctcagatccaagcggtacaaaactccatttcctgtagtgcacacatctacaactttttaagctgctcttctaaaaaaacctacttgtcggccttcctggttcttgttttaccactttcttttgctctctaagaaacgtgcatatatttttataaaatagcctatactgtaatttacgaccatttctctgcttcatcctactcatcaccccagagagaacgaatatgttggcagtatgtaactacattcagatttacaaatcagacatggcatttgttaatgccccagtgtttcatatttttgttagttttcagcatgcctgtctttcctactagagctaaaaggcagggtctgagcgtcttacgcgcctccatcttcaaggcgtagcacagtgactgaaaaaaactgacgttgaacgtgcactaaactgaactgctcaaacacctacaggcacagggcgaggggtagaaccacatcgcttgactcttaagtgtgtttccaactgctcccacttcccgttttctttagagaaacccagaccaaacaaggaaagggaaataggccacggtagggtcattactattgctccttaagcttcctcgccggtccacctacccagacaaggcaaacggaaatctgcagcaggactcagcttggtgcacacaactccgccctcgccacacccactctgcagcgtctggcccggcaatacccatctgggcgcccctcctgcttcctctaggctgtgagtacgcgtgctgccccagactctccctcctccacccacacccgcagtgacaccccttccgccaaatttgtttctctttctttcagcgcctgcgcgctgtcacgttacggcggaactaatccagcgacgcctgcgctttgacgcatttggtgccgtggaagggaaaaagggggactgcagtatgcgtcacacccggaagcggcgagccggaagtggggttagccaggttatccccaggggtggagaagcggaggcccaggaggagggggaataaagaaggtggaggatcctggctaccactctgaatccgataccgcttctcttagacctcagcgacagaaaaagggaagggtgtctcatcccccttcctcctctcctccctgtcctgagccttagccatggccgaggcaggggctgggctgagcgagaccgtcactgagacaacggttaccgtgacaaccgagcccgtgagaaaggcgggggggcggtgctgtttaggggtctgggagatactgggagggaggggacagggattagaagagttgttggaggagctaggcctagggatatgggaggtgtggggttgaatatctagggctgggagaatcggaaggtattggagctatttggagtggcagagatggtgcaggaggcaggtcaaggaacttgtaatagggaggtacagttaggatataggtgttgctgcttggggtggttatgtgtgtaagtaataaacgaaagggaaattgaggattaaggagccaggaagatgttgggaggaaatcaaaggtagtgtaagaaagcatggttggaggccaacttatcaatattatcaatattgatattcgaataaatatttattgaatggatgaatgtaaaaggaagtggcaggaatgaggaaacaagaaaaggagatgaaaagaggtattttgagaaatcagagagcaaagatgtaaatggagaaacaagaagtatttatccaaaaacatgttaagttgccttcaaagggagaaggttgcattgggcttaatactcttggattaaaggaagtttagtaattaatagattagtaatacttgctactagagatgccaggatgccagagaataggtggataagaggtagggagggctggagcttgagaatgagagaggttttgtttgtttttttaagagaaaaagaataggggatctggaaaaaggaagggagatcaaagattaggtgctggggactgaaaaataattttcatgtattaatactaccaaggatgatttggggaggaagacggagaaacagcaaggattatattttcctttgaagagttgctgggacctttcctaggttaggaattgtgtcttctcttatactggtggtataagaacaggaaataatacttattcctcaagggactatctgaggtaaaagacctgttctgttttatcttctgtcagctcctctggtgctatgcctatggtactgattgagctaaagaagaaaagagaggaggttccctgggagggagtgggaaaggttagtaagaggggactagataggtatgctcatccttaaccttctaggagaaccggagccttaccatcaaacttcggaaacggaagccagagaaaaaggtagaatggacaagtgacactgtggacaatgaacacatgggccgccgctcatccaaatgtgagtaattgttggcccgcagtagccctggagttctggctcccttcagcatatcttgtatctactcatatccactggctttccagaagcccccagatgttcatagttctgtcacttttttggtggtgctgtggtatcagggaaagaggtagggaagggctagaactggaattgcctaggtctgacagcaagaagtgtcagaggtgggagaagtggggctttgaattcgtggctctctaagaggacaagaggggtggggcctgagtcccagagggtgggcctggggaagctggatcctggaaggtaggagaaaataggaattttcactgagtttgagtgggaatggaactgactatatatcttacccttcctcctctttaactgggctcctccctctaaatctaggctgctgtatttatgagaaacctcgggcctttggcgagagctccacggaaagtgatgaggaggaagaagagggctgtggtcatacacactgtgtacgtggccaccgcaaaggacggcgtcgtgcaaccctaggaccgacccccaccacccctccccagcctcctgacccttcccagccccctccagggccaatgcagcactaaatccctctctcctccagcattcctgtgtctgtctggccctaaatgtatccatgtggctacttctccagccccctccttccctctcttctgcctgatagagggaagaggaagaggaggacgaacagagatcctgaaattctgacttgctgctattccagaacccagcctcctgggtttccccagtcctcatttttcctcccaatacccacccttctctctcgagggatctaggcaccttggtcccagtgtcttccttttgttctcactgccaaactgcctgtcctgggatctagttatcttggccctgcactctcaacatgagtagcgaacacttaaattgggttttcaacagtcccagctttcactgccagggtcccagtcagattccaggaatttgcgccctaactttgcttgctaatcctggtttagagctatcccactaaaatatttaatcctaattcttagtccttgcctgtgagatatgaggtcttacaggagacctcagagctcccagcccttctcctcctgctaacccttctcacaccctcaagaggagttagaaaagaggtccttgtcattctcacctcttatggaaaatggaataagaaataatcatatcctttcttcccacccttctcctgttatttaggatttctgacaaagctggcttgagattggtcacttagagccgactgtctcctctgccttttgtttttcagcttcagagacagatccaatatagtcccagggacctgggtctctgggagaggaaggaagagggagggagcaaagagattggggtatgtcccctgtagtacactcttacctcttacttcctagactttgatttctccggcagcccagatgttcagttctcttggcccctctctaccccttactgggatctggttttcattttccggtccttttgccatacacagttacagagatcagtcaaatccataccaccactgagatctcatttattgccacagatgcacaaaataaataacccaaaatcacaaaatgtgttaaatatgggcccatttatacttatggggaagggtgtgagactatacacaaggatgagtttggagatgtctgaagtattcccaggttgaggaggagagaggggaaatagcaccattggttcctttccgtgagtatgtgcggggagaagtttcaagaaggttcttatggaaaaaaggctgtgagcatagaaagcagtcataggaggttggggaactagcttgtccctccccacccccggatcatcctctgaattagatgacttggatgttgggacttcaaatctacacagatgaggggaagggtcaggaaatcagccctctgatcctaatgcccccacgcataccccactcacatctctggaggaagaagggatgagactataccccagaaaacctgcctattaatgggaacaaaggtgtgggcccagtgagaacgtgatggctatggcagctggtgagaaaaggagggaacagaaaagtggaactcaccgtctccatgtcttcctcatatcctaggatgggcagaaacaaacatggatgtgagctctgggcttcattccctggggcatccttccctatctctcccctcctcaggtgagttctgtctgagttagcagtgtccctcctcacctttcagagtgatctcacctctttacacactgtgctcctttccctctcattctcctccttcacctttcatgatccctccttcctctcaccccatcacttttccctcatcctcctaactccatccccactgtcctccccctttccactccccaagggttctcaattctcttttcccaggctcgtccatgactgtttcttgtcctcagagcccttgccttccttgctgcctcctcagtcccattctctgtctctttcagcggccccatccttatctaccttccccagtgcatcccagaaaaacatctgtcccttcctccctccatcacacagaccaaacacacacccagagccctcgggctaagagttggtatataaaagccttacaataaagctgcttcccctcttgcaataaaagcccagtggcatttattgggccctttgctttgtgtctctggaccctggccagggaggcagctagacttgaatgtgtcccaaaaggcccagcagatccacagagtactatgggagccaggagagggcactggatgctcccctccaaacactgggataccgacccctccacttcactgtctagtgctgatggctggagcaggccgatatggtggagcgggggagagagaaacaatttgcataattgtgccaattactttcagactaattaggtctatgaagacttcaaagggcagaagcaagacccaagaccagcttggctgctgggaagaagccagtcaggagtcccagacgcccaggggtcggtcgggcaagggaatgggctggttagtggccaaggagccggggcccaggagaggcgcggtgggtagatgggtggtaagactgggatgtggagaggagccagaggccccagcggctgttctcccgcacctcgcctccacccctggccgctcctgcctggggccttgggaggagccgaaataacaataacaaacaacacagggcttagcttgagccagagtccgagaccaacccccacgacgctacggggaggtttggatatgccccaaccccttgctcccttcctccatcctcttgtcagtcccctcctccccagctttttctccgcccccaacccaccagcccagcctcctgctcccgctcctctaagcaggttctgccctcgcccaccatcctcccaggacccctcctcaccctcagctgggtcggctctcccttccgcccgccgctccctcccctccgccagctctcctcctcccgggcgcctgcggctgccctgccaaaacttctgcagttcccatgcccttcgcggcgactccagggctctccgcgttctatccggtaccccttctctgcctccccagtctcttctctccagcccctctcacaaggctcaggcatcggtccagcctcctcccctgtggaccaagtgtcaactccatccatcgtccttccgggcgcctctcaccttgaggacccagggtcctcgccccctcatcctttgcttttctctccccaccccatcctttgcctaaacttccacagggcctccggctccagacgtgccattcccggcttccccgggaatctcccgcttccaccaacaactccgcgacgcgcgcccagcctcacctctccgggcaggtccaggcagcccatggtggggatgcgcccccctcggcgtctccccgcacgggccccaggctcagccagcttctctcgcagctcgcggctgattcgcacctccaccgccagccgcacattagacctcaggctgcggcggggacacggcaggccgcagcagggacaggcggtgggggaagcctcggtgccggtcgccggcggagtcccccagcggcgggccagacacgcgcggcagaagctgtgctcgcacgccagaagcaccgggtcctcgaaggagcccccgcacagaggacacgtcgccagctgctccagacgctccaccagccccgggcccagctcgggcgcatccatggaaagccaggatctggacgccgccccttccgcgaccaccgtgaccgccttcgagcgcgcagatggcgggccgcccctgctgcttgctgtgtagatgcccttctctccgactcccgcattaacttttgccgctttccgcccctctcctgggattgcctctctcttcaaccagagtctcagtctcgtcaaatctctccaccacatcaggctttatagggagggaggaggctcccacgggaggtaaacaccaggccttgcgtaacgcctcatctggttctcctgcttcccgggtaaggtttgggggagcagggaggggagaatagcacacctggttcccagagcctaggaggcggtcactagagggcgctctggggcggggtagccctgtgtggggagggtagccccctgtgaccccccgaagagccccaattttaccttcccctccgcctgtggtacgcgcatgggccgggtgcccaggctcactcttggcatgtgcgcccacattgccaaggtgcgagtcattccaggtggctggcacacctacatctgggggctgggggccggaagcacagatcctggtttgtgtggctttggcaagcctctgagtgttgatgtgtggttttcattcctggtgcctctcgcctttccatcttccttccttacctattaagggcttaagggcattctgcagctctggggtaaggggtggggagcaggcgcccacacttcggcctcagggagtcggggcagagctctttcagctctacctctggccagctcccagggcctctccttactttcttcgtaagtctctctttctggttctttctctctgtttttccccgtgtgtgattttattaccagttttctctttccttccttctttggaatgtacccggtattatctatttcaactctggtagttcacagaggcccagagaactggaatagccaaggtcacatagcaagggaatgaccagaagtggagccctaccctggtcttctgacttgtgttcttgctgtgactcaaccctgcctttttcagttgcagatccctgggaccccctcctgcttcctgatttttttctggtgttcctttgtgccttcattcctcacctccattctctctttttctccttacctgctcctctccccacctctcctcttcctccctgctccctcctcttcctagcttctctacccttccaatgccaggcctagctaactggatactcatgggggtttgtgcataagtaaacatccagatgtctacaactatgatcacccacactgttatataacatgtgtctgcatccatcagtgtccaaatgcccaaatgtgcacaaacttgcagacagaagcattcatgtaatacaaacatcacagctaaatataatgtgtatgaatagcctcatatgcattgaatatcactgggataaatgtccagtattatttaggaacagacggacatgctcaaagaaaacaggcaaagagacagatactctatcatcagttttattattaataagaataacagtataacagcagtaagtctttatggagcagcaggactttattaggcaccccctccaggcactcttcttctgcctcccccatacttatcggggagacactcaaatatgacaccctgataaacaaacctacacaaacaaacacacgtacattcatcttggaacaaccctcccggctcagtgctcataaaacacacagatacccaagcataagactacagttgtgactgaaatctattttgtaaaagatgcacttctatgctctgataggtagcatagagagatagcagcatgagaagtgatcagcctgacattgctggctttggagactgaggcaggaagccacaagctaaggaagtgggtaacctctggaagctgcaaaagacgagggaatggattctctagcagaccattcagaaggaacctagcactgctgacaccttaatttttgcccagtaagacccatttcagactctgaactacagaataataaagtaacaaatgtgtattgtttcaagctcctaagtttgtggtaatttgttacagtatcaataggaaactaatacacaagattgccttttctcctccagtctctgactctctgagtctgtttgcacttctgtgttgttgcaccttccagtttgtcatattttctggatgtctctgcctctcttgaccttcttttcagtctcatgttatctcttttccttcattgtcctggcttatccccaactccaaggcctctcaggatctttttggatctgggcttgaagtactggagaaatgtctctgagactcctcaagaacctcaattgtcaccaatccaagtgccttgctatggccctcatgggcttgtcagcggttaacagcttcagttgcacattagaattatctgggaaactttaaaactcctgatgcccaagtgacacctcagaccaattaaacggacaccctgggggtgggtcccaggtgtcagtacttttaaaagctttccagatggttgcagtgtttagctaacaggagaaccatggtcttgaatgacggctgttcatgtgggctggtcactccattttgctccttgtgctctggctgcagtgccttctacttctcgttccccgagccactgctggtgcggctgcaccgcctttgcactcactgttccctctgcctgggcccctgctcctccagagcttcacatggctttctccattttctcactcatgtctcaacccaaaggtaacattcagagaggacttcttttaccacttgtatctcaagtggtctttctcaaaggtattcactatctctttacccatatttattatcttcatgctatttattactgtctgcagtgatctatttatggacttttgatgtgtctctgtccaatagaaggtgagtgaacagggacctaaccttcatgtttgctgctgctttccctgcacctagaatagcacctggcacacagtgagccttaataaacttaggtccagttgttgaattgctcattacactgattggacaacctgagagggtcatttgattgactctgcttagaccttcttatccttctcaaccaatagtcatgcctcactggcagatgccaggcatagtgctgggaaacgctcaggtgttataagacatatggtgctcagtctggctaggaagttcatgactagttgtcatttgccttccataaccagatggtgaggattcctgctaacaaagcatcagctcaacctttacgtccaggttacaatgagttcatacctaatggttccaggacaccagtaagggaaaaggcatttggagacagactctgcctggaaacatctcacttctcaagaccttctccctccctttccagaatccctaacaactctatacttgatgctctaatcaccactgagttcattctatttccagagagccagaagggtggatgtgattttacgtgtgtcagcttggcttggcttgatccagttgaccatgacgggatcctgtctctctgctaggatccacatcttccttccttaatgtaggtgtctcctaaataactgttcccacccctttccaactccttccaggattcctacttgtggtgttgtggagtgtgacagcttgatacccatgcatggcactagggaatgtcagaggtgggacaggccttgacccatcccttcttttccttctcttcatttttttcttctatcctttcatttatccttcagtctctctcctccatattagcaacatcctcatgcttttaaaagccccactagtctttagaagctttccagagggagagataagtatgatagaggagtttgggagactgatcacaggacagtcatggtccctgcccttaggaagtgtgataaggcaggtaaagtgtatccatcatcaacaaaatttagcattactgaattagggtgtgtaagaaggcagataaagtgtatccatcatcaacctaaatctgtcattaccaaattttaaaggtgcagtgacgggggaagagtgagggaggattctgttgacagattgaaggacaagtgggaatcatttcaggaagtcttccaggaggaggtgacctgtaaaagaagtgaaggttgtgttgactggaagagaagtgaaaaggcctgaacaaagaatgtgaagcatctctggggagaaaactggattgggaaaagaagggctaggaggtaagaaatcaaaatgaaggagaccataattctttctcaattcccactcactatgcccttcccaaagattttcttcaatcttgattgtttctataatgactcatttttttaaggacttggatgtttacactgtgctttaacatagctggaaattctattagaccagagcagttttcctatgcaactactccaaggactctgagtaaaacttgccctgatgggggaggcagttttaggaggggtggcttgaggcagggatagaggaagaatatccagccagattaatccaatcaatcttgatactcaaatacatgactatgttatagaaatgtcaccttcatagtccattctctcatttaaccctataacagccgtgaggccaagtccagccatgttacactgaggcccctgggattctggcatggtaagggatttgactaggctcaaacagccggcaggaggcagagccaggactgaaattcaaacctgctggctccaaagtctatattcttttccttaaatattaatttctttcttttgagactttactttctcttttctgtccctcctggaaggctccttcctttctctccctttaaatccctgcttagggctaacagtttctctgaaatgttgcccatccttcaagttcatgtaggtgctcacttattctctttccttccaacaacccacctatcaatgtcactaatatttctatccatcatttaaattctcccctaaatgttcactatttgtcttctcagttttcttatttatttatttatttattattattatactttaagttttagggtacatgtgcacaatgtgcaggttagttacatatgtatacacgtgccatgctggtgcgctgcacccaccaactcgtcatctagcattaggtatacctcccaatgctatccctcccccctgccctcaccccacaacagtccccagagtgtgatgttccccttcctgtgtccacgtgttctcattgttcaattcccacctatgagtgagaatatgcggtgtttggttttttgttcttgcgatagtttactgagaatgatgatttccaatttcattcatgtccctacaaaggacatgaactcatcattttttatgactgcatagtattccatggtgtatatgtgccacattttcttaatccagtctatcattgttggacatttgggttggttccaagtctttgctattgtgaataatgccacaataaacatacgtgtgcatgtgtctttatagcagcatgatttatagtcctctgggtatataaccagtaatgggatggctgggtcaaatggtatttctagttctagatccctgaggaatcgccacactgacttccacaatggttgaactagtttacagtcccaccaacagtgtaaaagtgttcctatttctccacatcctctccagcacctgttgtttcctgactttttaatgattgccattctaactggtgtgagatggtatctcattgtggttttgatttgcatttctctgatggccagtgatggtgagcattttttcatgtgttttttggctgcataaatgtcttcttttgagaagtgtctgttcatgtccttcgcccattttttgatggggttgtttgtttttttcttgtaaatttgtttgagttcattgtagattctggatattagccctttgtcagatgagtaggttgcgaaaattttctcccattttgtaggttgcctattcactctgatggtagtttcttttgctgtgcagaagctctttagtttaattagatcccatttgccaattttggcttttgttgccattgcttttggtgttttagacatgaagtccttgcccatgcctatgtcctgaatggtaatgcctaggttttcttctagggtttttatggttttaggtctaacatttaagtctttaatccatcttgaattaatttttgtataaggtgtaaggaagggatccagtttcagctttctacatatggctagccagttttcccagcaccatttattaaatagggaatcctttccccattgcttgtttttctcaggtttgtcaaagatcagatacttgtagatatgcggccttatttctgagggctctgttctgttccattgatctatatctctgttttggcaccagtaccatgctgttttggttactgtagccttgtagtatagtttgaagtcaggtaacgtgatgcctccagctttgttcttttggcttaggatagacttgacgatgcgggctcttttttggtcccatatgaactttaaagtagttttttccaattctgtgaagaaagtcattggtagcttgatggggatagcattgaatctgtaaattaccttcggcagtatggccattttcacgatattgattcttcctacccatgagcatggaatgttcttccatttgtttgtatcctcttttatttccttgagcagtggtttgtagttctccttgaagaggtccttcacatcccttataagttggattcctaggtattttattctctttgaagcaattgtgaatgggagttcactcatgatttggctctgtgtttgtctgttgttggtgtataagaatgcttgtgacttttgtacattgattttgtatcctgagactttgctgaagttgcttatcagcttaaggagattttgggctgagacagtggggttttctagatatacaatcatgtcgtctgcaaacaggaacaatttgacttcctcttttcctaattgaataccctttatttccttctcctgactaattgccctggccagaccttccaacactatgttgaataggagtggtgagagagggcatccctgtcttgtgccagttttcaaagggaatgcttccagtttttgcccattcagtatgatattggctgtgggtttgtcatagatagctcttattattttgaaatacatcccatcaatacctaatttattgagagtttttagcatgaagcattgttgaattttgtcaaaggccttttctgcatctattgagataatcatgtggtttttgtctttgattctgtttatatgctggattacatttattgatttgtgtatattgaaccagccttgcatcccagggatgaagcccacttgatcatggtggataagctttttgatgtgctgctggatttggtttgccagtattttattgaggatttttgcatcaatgttcatcaaggatattggtctaaaattctcttttttggttgtgtctctgcccagctttggtatcaggatgatgctggcctcataaaatgagttagggaagattccctctttttctattgattggaatagtttcagaaggaatggtaccagttcctccttgtacctctggtagaattcggctgtgaatccatctggtcctggactctttttggttggtaagctattgattattgccacaatttcagatcctgttattggtctattcagagattcagcttcttcctggtttagtcttgggagagtgtatgtgtcaaggaatttatccatttcttctagattttctagtttatttgcatagaggtgtttgtagtattctctgatggtagtttctgtttctgtgggatcggtgatgatatcccctttatcattttttattgtgtctatttgattcttctctcttttttctttattagtcttgctagcggtttatcaattttgttgatcctttcaaaaaaccagctcctggattcattaattttttggagggtttttttgtgtctctatttccttcaattctgctctgattttagttatttcttgccttctgctagcttttgaatgtgtttgctcttgcttttctagttcttttaattgtgattatagggtgtcaattttagatctttcctgctttctcttgtgggcatttagtgctataaatttccctctacacactgctttgaatgcgtcccagagattctagtatgttgtgtctttgttctcgttggtttcaaagaacatctttatttctgccttcatttcgttatgtacccagtagtcattcaggagcaggttgttcagtttccatgtagttgagcggttttgagtgagattcttaatcctgagttctagtttgattgaactgtggtctgagagatagtttgttataatttctgttcttttacatttgctgaggagagctttactttcaagtatgtggtcaattttggaataggtgtggtgtggtgctgaaaaaaatgtatattctgttgatttggggtggagagttctgtagatgtctattaggtctgcttggtgcagagctgagttcaattcctgggtatccttgttaactttctgtcttgttgatctgtctaatgttgacagtggggtgttaaagtctcccattattaatgcatgggaatctaagtctctttgtaggtcactcaggacttgctttatgaatctgggtgctcctgtattgggtgcatatatatttgggatagttagctcttcttgttgaattgatccctttaccattatgtaatggccttctttgtctcttttgatctttgttggtttaaagtctgttttatcagagactaggattgcaacccctgcctttttttgttttccatttgcttggtagatcttcctccatccttttattttgagcctatgtgtgtctctgcacgtgaaatgggtttcctgaatacagcacactgatgggtcttgactctttatccaatttgccagtctgtgtcttttaattggagcatttagtccatttacatttaaagttaatattgttatgtgtgaatttgatcctgtcattatgatgttagctggttattttgctcattagttgatgcagtttcttcctagtctcaatggtctttacattttggcatgattttgcagcagctggtactggttgttcctttccatgtttagtgcttccttcaggagctcttttagggcaggcctggtggtgacaaaatctctcagcatttgcttgtctgtaaaggattttatttctccttcacttatgaagcttagtttggctggatatgaaattctgggttgaaaattcttttttttaagaatgttgaatattgacccccactctcttctggcttgtagagtttctgccgagagatccgctgttagtctgatgggcttccctttgagggtaacccgacctttctctctggctgttcttaacattttttccttcatttcaactttggtgaatctgacaattacgtgtcttggagttgctcttctcgaggagtatctttgtggcgttctctgtatttcctgaatctgaacgttggcctgccttgctagattagggaagttctcctggataatatcctgcagagtgttttccaacttggttccattctccccgtcactttcaggtacaccaatcagatgtagatttggtcttttcacatagtcccatatttcttggaggctttgctcgtttctttttattcctttttctctaaacttcccttctcgcttcatttcattcatttcatcttccatcgctgataccctttcttctagttgatcgcatcagctcctgaggcttctacattcttcacgtagttctcgagccttggttttcagctccatcagctcctttaagcacttctctgtattggttattctagttattcattcttctaaattcttttcaaagttttcaacttctttgcctttggtttgaatgtcctcccatagttcggagtaatttgatcgtctgaagccttcttctctcagctcgtcaaagtcattctccgtccagctttgttccattcctggtgaggaactgcattcctttggaggaggagaggagctctgctttttagagtttccagtttttctgctctgttttttccccatctttgtggttttatctacttttggtctttgacgatggtgatgtacagatgggttttttgtgtggatgtcctttctgtttgttagttttccttctaacagacaggaccctcagctgcaggtctgttagagtacccggccgtgtgaagtgtcagtctgcccctgctggggggtgcctcccagttaggctgctcgggggtcaggggtcagggacccacttgaggaggcagtctgcccgttctcagatctccagctgcgtgctgggagaaccactgctctcttcaaagctgtcagacagggacatttcagtctgcagaggttactgctgtctttttgtttgtctgtgccctgcccccagaggtggagcctacagaggcaggcaggcctccttgagctgtggtgggctccacccagttcgagcttcccggctgttttgtttacctcagcaagcctgggcaatggcgggcgcccctcctccagcctcgctgccaccttgcagtttgatctcagactgctgtgctagcaatcagcgagactctgtgggcgtaggaccctctgagccaagtgcgggatataatctcctggtgcgccgttttttaagcccgtcggaaaagcgcagtattcgggtgagagtgacccgattttccaggtgccctctgtcacccctttctttgactaggaaagggaactccctgaccccttgtgcttcctgagtgaggcaatgcctcgccctgcttcggctcacgcacggtgcgcgcacccactgacctgtgcccactgtctggcactccctagtgagatgaacctcagatggaaatgcagaaatcacctgtcttctgcgttgctcacgctgggagctgtagaccggagctgttcctatttggccatcttggctcctccccccatcttctcagttttctcaaggccttcttgttctccaagcccttagcagtttccattttttttttgtttgtttgtttgtttgtgacagagtctcgctctgtcaccaggctggagtgcagtggcatgagctcagttcactacaacctctgcctcctgggttcaagcgattctcctagcttagcctcccaagtagctgggactacaggcacatgccaccacacccagctaatttttgtatttttagtagagatggggttttgtcatgtttgccaggctggtcttgaactccttacctcaggtgatctgcctgcttcagcctaccaaagtgctaggattacaggtgtgagccaccgcacctggccagcagtttccttttaagagctgtgcattcattcatccattcatttaatcattcaacaactatttactaagcacctactatgtaccatgcgttgttctaggagttaggaagagtggagagcaagccagccatagtcccttgtcctctggtaatttagattccattgaaaaaggccaacaataagcaagtaaacaaataaattaacaagataattatagattgtgatcagtgctttgaagaatacaaagtgggtaatataagaggaattaactggaggaggtgtgcactacttttaataggatgttagaaaaagctcctctgagaaggtgaagagagggagccagcaatgagaagagttgggagagagcaacaacagcagatgcaaagaccctgaagtgggaaagatcttgaacgtatgaagtgggatgacaatggtttgatgtgagattggagaggtactaagagccaagctgtgtaggaccttagggaccaggataaggagttgatcgttgttctaagagcagtggaatgccactgagtagctgtaagtgtgatatttacgtggtctaatggattgattgattgattgattgattgtagagatgggatctggctgtgttgcccaggctgatctcaagctcctggcttcaatcaatcctcccactttggcctcatctcccaaagagctgagattataggcataagctaccacactcagcatgatttatgtattttgaagctcattttgtcctagtagtcttttctctcagttttctttttctaattcctattccccttcacattatttacattcaagacgatcatctcatttccatgtccacttccccatcggggagaataggtcttccaaacaagttatttattaacctgtacaaggatcgctagtaagtgcaccaaatatagctaatttgattctggctcccacctctattaaagacttcaaagaatcatagatttgtagaatgctagagttgtagggaacattaacaatgtgtagtctagcccttacaatatggataagaaaattgattcccagagagatgatcttgctggtgtgtaagtagggaaaactttcggatcctcatctgtcaagaatgcaggagcaggttccttcctgtcttttaggcgcctgtttcaattaagaaaaaaaatattggctgggcacggtggctcatgcctgtaatcccaacactttgggaggctgagttgggcagatcacaaggtcaagagatcgagaccatcctggccaacatggtgaaaccccgtctctactaaaaatacaaaagttagctgggcatggtggcacatgatgtagtcacagctacttaggaggctgaggcaggagaattgcttgaactcaggaggcagaggttgcagtgagcaagatcactccactgcactccagcctggcgacagagcgagactccgtctcaaaaaaaaaaaaaaaaaaaaaaaaaaaaaaaaaaaaaaagtcaggatgtcctaactggtttattggcttcaaggtcaatcaccataggtcagtagtgctgcagctactgctagcatagcagccacgggcccagctgccctacccccatgcacatttcatgtttattggggctcatccatgctcttctataggaaaatagcctctacctcacttctgcatttcaaatctcatagaaatacatttagttggaaggacttatttcatgtccagaatcctagctccaaaaattctgagaaatagagttttttacttttcaatctcttcaatagaaaggaaatgaggtcattccatatatgtaggtttggcagataaaatgcagaacatccagttaaatttgaatttcagataaacaatgattttttagtataagtatctcccaaatactgcatggggcatacttacacaaaatacttgtttattatttatctaaaattcagatttaaatggacatcctgtacttttatttgataaatctgacattttgacaaatctccagcacagagactgagagcagaagtccttaatttagatgggggacattgaggaaggcccatcttccaaggtgatatttaaggggagacctgagagatgaataagagatcatcatgctcaaagaggagagaagggcattgcaggcacaggtaacagctttgcaacagcctagaggcaagaacaatttgggctaatttaagcaaagttgacacatgatgagttaggagtaaagatggcacaagataataatgaagacgtaggcagagactagagcaagtgaaatcttaagttttagtagtggaataaacaagagtggaatgggggagacccagggtcactacctgctaatggcattcccagagttgtatacggcagtcatcccaaagagagaaaactatgccagtaatttaggtgagaaaggatgatggcttgagatagtgggatccagtggagctgaaaatgagcaggccaatttgaagtgtattttgtagatagaattgacaaaaacattgaagtggcctttgggtgatgagggaggggaaaatcaatcatgaatttctaatttctggaatggatgactgtgtaattgcaaggctgttacagaaatgggctacatacttaatgagctttggatgttgagatgggatcacaagagagggggtaaagacaaagtgatgagatattttgtttcagttggaccacagtccacaataactgcttctcctctctgcagaatattcactaacatgcacgagacctgtttgctctgtccttctctccttcctccctgccctccccttcatcattttctcctttttattctctgtcctttctttctgttctgtagtcatcctatttccttgacagaatcgaagcctcagccagtgagatagatggagtgtaggcagctagaaatggaaaggattcctgtgcttctgtgattcacagtctcccagtgggcctttaaaccatttaacctctgttgtccagaccccaggaagaggggaggctggaagagggaaaagaacttggactggagcagcaggggaggccctggaggaaggagcaggtatcatcctccagcaaatgggcaatccattagtccaaactcctcattttaaaattgaaaaaactgaagcctttgcccattttgactaaaccagataagaaattatacagtatgaaggaacattgacaccacttagaaacagtagggtgtcaagatttgacttgactcttgttagttttgtgactataaagtgaaaacaattatatcaaaaaatttgttttagggatgataaaagtaatttatacttattcgttcaaaagtacttattaaggacctactatgtgcagatacagtgttgaaagctagggactcagtggagatcaacacagacaggaacctggcctcatgggaattctaaactctagcggggagaacagctcattaacaaataaataagtgtaatgtatggtaggtaccacgaagcaacataaagctgggaagaaagacacaaatgctagcatagttttctctctttgggatgactgccttatacaactctggggaatgccattagcaagtagtggcctcggatcttcccccattgcactcttgcctattccactactaaaacctaagtttttgcttgctctaatctctaagtcttcattattatcttgtgccatctttactcccaactcatcatgcgtcaactttgcttaaattagcccaaattgttcttgcctctaggttgatgcaaagctgttacctgtgcctgggatgcccttctctcctctctgagcatgatgatctcttattcatctctcaggtctgcccttaaatatcacctagagagatgggccttctcaatgctggatggagtgctggatggagtagatagagttacaatctcaatagattctatttgagcaaagatttgaaggtggtaagagaagtcgtcaagtgcttatctgaaggaaggatcatccagatgaaaggaaaggcagaggcaaaggctgtgatgctgaagctgctgatgtgtttgagatttaacatgaggccatgtggctggagcagagggagcagcgggtgtggagtaggaagtcagagatgggactggccgactgtgcagggctttgtcattgtcaggacttcattcagtactgggtgaggtgagcctaccaggggttggagttggtgggaaggggctgacttctggacgtgagttactgcattggttgtggagtgtgagagcaaaggaggaggcaggaagctctaacgaatttggccccaccatggggaggatggagctgccagtgactgcagtgggaagaactgtgaggagctggcctgggcaggaatatcaggggtggcatgttggacatgtgaagccaggaggcctgtgggccatccaacagtgctgtgaactgtgcagcccgatgtaagcatatctgacattaggagtggtggagaaacaaaaagaacaaggatagttcattttaacacagtaataattttataattttataattttcaaatcattaaagattttactactttcttaactactccaggagcctgtgtcacattccagtcacagggaggaaactgggggccatgcaggataaaggtcaaagcctgcatgctgggactcaagtgcttcctccccaacagtattagaacaccaactcccaggagcacagagacttgaagagagtgtccgggtcgtggactatgagtcagagaaaccaagccaggggcatgcaaggcagcacgaggcagagcagggaaacccagcaagggaggtggcaacgcacagtgacctagaaaagcctgatgagctgagagccagccgacaacaggccccatgtgcctctgtgtcttggtccacatgatagactctccctccctcccttccttcctctcctctggtgaccagtagctaaaacatcactggcacgctgctggcatccagcctgccaattagttcaggagccactccctctgactgcctcctgagcctcagatgttacctcccctgtctcccaaacacacccctccagctctgtcctgcctgccctgaatctctggaaggaaaacttgccctgggacctgccttggactctctggttcccctcatccagcccctccctgcgcagaacatggcatctcgtgcccttttatctgccatttctggccacctttgcaagcgtccttgaaaccagcgcttggtagagttatccacgcccatgtgaggctcccctgacccctgggtggtgtatgtggcaggaggagcagggaggagcttcaaggaagcagagggaaaggaacctataagagttcttgggatggcttccaggaagctgtgaggacagagctatgctgaaaggagaaaggcaaaggctacagaaaagtgaacactgaagaggaattaggcaagaacaaagcctaccaagttagaagaagggaatgagagggcgaaacaacagcaccagaaaggaatgaggttgccgggcacggtggctcatacctgtaatcccagcactttgggaggccgaggcaggcgaaccacctgaggtcgggagttcgagaccagcctgaccaacatggagaaaccctgtctctactaaaaatacaaaattagctgggtatggtggtgcatgtctgtaatcccagctactcagtgaggctgaggcaggagaatcgcttgaacccgggaggcggaggttgtggtgagccgatgcgccattgcactccagcctgggcaacaagagcaaaactgcatctcaaaaaaaaaaaaaaaagaagaaagaaagaaagaaaaagaaaaagaaaggaatgaggatcaggagtcggggggagagacatgatcttacagaacgggctggacctggggagaggattttgtcagaactatggaaagtttgaaatgaggttgaagaaggagtgatggtaatactttttacatttttagaacatcttcttatattttatttcatcattcattcctcatagatctcattacccccattttacggatcaagaaactgaggctcagagaggtgatgtgagttgtccaagatcacacagctaataagaaggtacattctcctctataccacagagcacctcttctgtgtgtggcatattacatagaaaaatgagattagacatttagaagttgaggattctcatcccgcaaacacttatggggcactttttatgtgccaggcaacatgctaagcactgaagatactaagacgccctgctttcaaaagactgaccttctggttaaggagtgatatgagtggtgcaaaccaggtggggggcggggctgcccataggctgagggctcctctgggagagggcagcttagggaagcttttacagcggatgtctgggaagaagggaaccacttccccagtgggtggtggaaggggatagcagagggcatttcagggaaaagcaagcaagcagagtgtgtgggagagctccaaggagttgagatccacaaaagagggatgtgtagggagctggatggaaaagctaaagaaataatggggagaatagtgatattaattaaattcgtgatctgtttaaaaccattgcatagggcaaggcacagtggctcatgcctataatcccagcactttgggagggtgaggcaggaggatcacttagcccaggagtgagagaccagcctgggcaacatagcaagatttgtcccaatgaaaaaaaatactaaatgtttttaaaaggcacaatgcatagctgtaataacagttgaggaggaatcttacaactacagtgttaaaggagacaaagggtgtttcttcattatgttgcggtgatggaaacttaaatgagataaggatatatttgagtcttcctatatgccagatggcatgcaaaatgtttttatatacattatgtaattgaattcatgtaacagtgaaaaatagtgaagatgacctatttgggttgacatgagaagatctataagatcgtggttaaaagaaaaagtcagtgcagaacattatgtactataaattatgacccatagtaaagaaacacatacaggggaagggttttggtcagagggagtacagagccagggcagccaagagaaggaggtgtgtctgagcctggtgcaggctgcgtgcctagggctggcactgagagggacatggagcttgtcatactgagggcataactcaatcctgttacactaggcaagtctcagagaattttcaagtggaagtgaaacacactctggtgacacaggttgtagagattgttctgtctgcaggtggatagattggaggcaggaggagagcagtcaggtaggagagatcccgaggggtggacaagcctggcccctggaaacagagtcgggggagaggaagcaagggtgagaaactgggctgaggaaatgagtgggtgacagatcttcacatggctggtagggggaaaaaaaaggaacacagaacacaattagattattttcaggattttcatcgcagttatatatgcaaataaaaagttaaacaagttgatgagttaattttttaaaatggcagccctcacccccatctccactactttcaactcttttagctgttttggtgttcaccttcacatctgtaaatacaaggattatattattactatttgctcttctaattttaggcattatctattattgatttgctgttatcaaagatatagctttttcttgtaaccacaacctcacttgatcccacaaacacatatcctcactattcccactgtccctggtttatagctatttcaaatacacacacacacacacacacacacacacacacacacacacacacacatttctatgtgtataaaacacagatatgtaaatacacacaaacatgtcctgaaggatcaaatcaaactaggattcaggaagatcatagctaaagaagactttcggcttgcacggtggctcacacctgtaatcctagcattttgggaggccaaggtgggcggatcacccaaggtcaggagttcgagaccagccagaccaacatggcaaaaccccatctctactaaaagtacaaaaaattagctgggtgtggtggtgggcacctgtaatcccagctacctaagagactgaggcaagagaagcccttgaacccgggaggctgaggttgcagtgagctgagatgtgccagtgcactccagcctgggtgacagagcaaggcttcataaaaacttcataaaaaaaaaaagaagaagaagaagaagatttgaaccaaaaggtagagaagcacaagacaagaggccgtgaaaaagcaagtcatgcattggtgagtatgtgtgtggagggcagggatgaggaaaatttcagaacagaatcaattcagccttgtgcagaaaggaataatgaaggcaggaggcagcaacttcagggctgtctgatttgaaggaaatattaaagcctttatcaggaaaggggaatcactaacagtcagacagaagcaccagactgaaggaaaaaagatcacagccccatatccttagagagtatcagagacctcagatgccaggcatctgccatgctgttgatttactctgcagtgagtcactggatccttgaaactgggggcaagggtgagatcattaccccagaaggcagggagcagagacaacaaggcccttggggtccaggcagctgaacccgtctggtcagaggccactgtcacaaaaccaacaaagaattcatatctaataggttttcctcagggctcagatgagtaggtttgggagttactgggaggctgtgataccaggcaggatgacaaacaaaaacagtcagccaagaaaacaagcttcagagtgtttgccctggcagaacaatggatgtccgggtacagccaaagccactggctcctccctccccacaactcagagccaccagggacctgggccacgtgtccctttccatgaccatggggtgtgtgactgcgggaggctgaaagtgtcagcactgtgacctggaaatatatgcctggattggggaggtggacaccttggaaataaactccagacttcctctatttgaaaaattttgtggccggaagcgttggctcaagcctgtaatctcagcactttgggaggccgaggcaggtggatcacgaggtcaggagatcggaccaactggctatggtgaaaccccatctctactaaacaaaatacaaaaaattagccgggcatggtggcaggcacctgtagtcccagctactgtggaggctgaggcaggagaatggcatgaacccgggaggcagagcttgcagtgagccgagatcgcaccactgccctccagcctaggcaacagagcaagagtctgtctcaaaaaaaaaaaaaaaaaagaaaaaaaaaaaagaaaagttttttgcattgaactggattctgcacatatctatacacatgctccaatcccactaattcatcttttttcccaatgcccaacctaaacactgagagaaaaaaaaagagcagcctctgacattcagaagttggcctaacagagctaaaccatgttattcacctagtaggcataaactatattacagaataccaatctcagacaagtttactcctagaccttgataaagtgagacaatgcaaggctgcttcacaagtttttctgagcacagatccaaaaaaagacactgtgccacccacaaaataccaaacaccccttctcttggttaacagaaatgtttgctacttctttaccaattatagctttcccctcgttctagtctcccctccctatagaaaatatttatttgggtattcattcacaggatctgctctgctttctaacagcattaatccagagcaaacccccacttccttagacctttccccaaatcacctaaccaaaacccaaaccctatcataggttttttcctaacactcttattaaaatgtcccacactccccatggggtgcattctccattgctgcaaggagtaataaacccagcatgtttaatgacagttatgttcctggggggtctttggctggaaaacacgggtaacactcagtgttctttgcttccttcttaactctctgggatctacattgaagacctggccccatgttgtgtgggagaagctggtacaaaggcaggaggtgctcttagaaaggacaaaaccagtaatgcattcactcaacaaatatttatggagcacccacacatgccacagactgttctaggtaccaaggacaatagacaaataaagcaggatccctgaatttttaggaagctctcagttggggtagaggtgagaaacacacataaacagatcgtcttgattgtggagattagtgcagtgatcaaggtatgccctggggactgctatgtgcttatagatgtggtgcctaaaccagtgtcggagaggagtgggggatcaagaaaggctttcagggaaggaggcgtttgaggccctggaaggctgaggacaagctaagaagaaggaacaatgaaagcgggtcagggagatgtaaacagtgtggtgagtggggaattttaggcaatttggcctttctggagtgaaaaatgggaagcaggtgggggcaggggttaggctgaaggcaggccaacgtggagttcaggctttatcctttagagaagggaggcattattgaaagtccaacaagttctaacatgaccagattatatttttagaaatcatttgaatatctgcaacttactttaaaatgcataaaattataagatggatagaaggatgaaggaatgggtcgacggaaacatatttgataaagcaagtacagtaaaatgctaatgagaaaatgtaggtggtaatatttggatggtcactgtaaaattcattcaactcttctgtcagaagattttcaaaataaaattttagaaaagcatagactttggcctgggtaatggaagatggattgggcagaataagtctggaggcagggaaatgagaaaggcagctgtcataatccaggtgagggctgatctagacagtgctaggaggaagatgggtggagtcctgtggtaggcgctaacatcaaggaggttggggcctcaaggactgtaagaatgaggaagaagaaagagttgaagataacacctaggttgggtgactgtgtgggggttggtagcaacaatgagtataaaacaggcagcaggatcaggtctgggaagggggacaagatgacttcatgaccccagagtttctatgggaatatgctttgggagcttgcagacccctggctcctcaagggggccactctggtgggggaagggactcagtaccgtggatctccatctcttgacacttgccccagttttcactggatttccccaggagtggagtggctcttactctccctccctagggagcagctcttccaccctcctaatgacttctccactcctgccatgctttttcctcttttagcttttgaaaaccatctttctcctttctctggttttccaagccagatactcaaatttgaccctccctggagagtacaccctctatgctcactatctcttttcccttctgctcatcttagcatcccccaagtgttgcccttggctcttttccaataccattgtttcttttttatgttctcgctttcctgtgggtgacagattatggagttgtgggttgaattttgtctgccaaggacatattgaagtcctagccccaggtacctacgtatgtggctttattcaaaaatagggtcttggccagatgaggtggctcacccctgtaatcccagcactttgggagaccaaggtgggcagattgcttgagctcaagagttggagaccggactgatcaacatagcaaaaccctgtctctacaaaaaatacaaaaattagccaggcatggtgctgtgtgcctgtagtcccatgtgctgtgtgcctgtagtcccacctactcgggaggctgatgtgggaagatcacttgagccagtgaggtggaggttgcagtaagccgagatcatgccactgcactgcagcctgggtgatagagccagaccttgtctcaaaaaagaaggaaagaaagaaagaaagaaagaaagaaagaaagaaagaaagaaagaaagaaagaaagaaagaaaggagaaagggagggaaagaaggaaggaaggaagcaaggaaagaaggaaggagggagggagggagggaaggaaagaaggaaagaaagagagagagaaaaagaaaatagggtcttttcatcaagttcagatgaggtcatattggatcagggtgggccattataagaggagggaaattttgacacagacacatgggagacggccatgtgaaaatgctgtcagagattggagtgaggcatctacaagccaaagaatgccacggattgcccgcaaacaccaggagctagaagaggcaatgaagcattttttcctagagcctttggagagagcatggctctgctgacaccttgacttcagacttcttgcttccaaaactgtaagagaatgtgtcattgtttcaagccacacagtctatggtgatgtgttatggaagccctaggaaactaatatagcagataagttgtgtgtgtgtgtgtgcatgtatacgtgtgtgtgtgtccgtctgtgtagggaaataccgtggaaagttactatttgttatagccattttatcatatattttatgagattttatcttttcaagtcaactttgcatgtgctttgtgttgaaagacctgagtttgaacattcataccatatttggaatatgggaatgtaacgatacctaatttaagcagttgtgagaagcaaatggaataatgtatctgaatccatttaataaactgttcaacattgtaaacatgctgttagtagtatcataactgtgtgaagaggcagaaaacactttggactgggggatggaaatcttggccagggttcagtattcacttgacttcccggccataacatcgaatgaatggccaggactctctttgagtaaatgagcttctgagaggctcctaaagaggcgacccccatccctcacagctgagaagagtgtgatcatcgtttaaggttaaggtccaggttggaagacctccccagatttaaaccttgctacaaagtattctttcatttactttgaacccttccttcatttacatccctttaggaaccaggccctgtagtgctcaaggagggtgggagagtgaaacgaaaaggagtgagatgctgcttctgttctcgaggacttcacagtcaacttgcggtaagtgctgcagggagatggctgtagtggctttgggagtgtgcacacttttccaacagaaagtaccaggaaccctgcctggggaaggcttcctggaggaggtgaggtggagctggtccacgaaaattgagtgggatttccaagacatcagtctttcgcgggaaaagagaaattagggcatggttttaatttagtaaatatttattaatcaagtaccccattctagggtccgtgctaagtgtctggggttggtagagtcaggaagtataaaatcaacttaagacatttgggaaagatctccctttgtagtaaggaagttgaatctgtacacaatgaaaggaaacaaggtaaaaggcgcgaagtccatgaccatgacgagggctgtgagaactgtaaatagggatttgggcagtcccggctgattctgaataaaagtccggaggggcgttactttcgggtctcggcctgtgtgtccccagccctttgttgtcccctccgcaggaaggtgaaggctgtttatgtaatcggcggcgcctcgcgggcgactgggggaactggatgggggagcctggccagggctgactgagcgcccctggaatccgtgctccgggcgttggctcactcccgccccgacacctgggcccgccctcccgctgcgcagccacgcgacgggcagcagcgtgggctggcgggcgactccccacgcctcctgcaacaccgccctctccctaccggagcgaggaggcaggaaaagcctagagacgcctggtcccatccgcctacccagtccccagccggcctgaagggaggaagaggaaggaacccataatcatcccaaactggcgcaaatggtgggttttactgtccagaggtcatttcgtctctgcgtttccaacctcctcgcccttttactttttttgggctcactcaggaaactggagcagtccttctctgggtttaacttcagtccctcacatggcaacactaggaatgatcaagacttttgttgcgggtagtggtgatgtgggtttgagaggaggatgcatctggtcgtgggattaattttggtttctgagtattatgaagaactagaaaagttttgcgtatgtcggttttcaggatggggttcagatgggtcaaagccctgtgcaggtccacgggggctgcaggaggtaaaatggaggaggagacaggcggacaagctggggtcagtggtccactcccctgtgtctgtcttaaccgagatgcagctggatgcttgcacgtggcagctttttcaaccacctgttgatagacgttcgtttccagtcttatcctgttaccaactgtgctgcaatgaacagccttgtgtatagccttttagtgtatttgagcctttcttttcgacccaggcatattgtaaggagagaggaactgagatagaaggaatatttaaagcagggtcagagaaatcaggactggatcaggaggaagcccgaagggtgtaaccttcccatagggctgctggaagcctagcttcaacccttccagctgcagcacatcccaaactggggcgagaagcgagtgaggaggagatgcagaggaaggcaaagaacaactctagcgacccagggtgatccgggtgccggaaaacagaagctggaaaaaggagatctgccccggaaaggaggcatggaaagtgtagatgtgggtcctcgaggtggcgtcgtagaagactacctctccgccctagtaatccacgcggacgcccactttgttcggacagaccgggagatcctcgcgggaaccgctctcgatgagcgcctggcactgggagccgctgctgtgcagctccacgaagccggtcaagggctccacctccaggaagccccgcctgggaaccagctccaaggccaagcccagcacgcaggccccgcccccgggcccttggagctccgcctcccaggcgccgcggccggagcaaaggcccagcgagcccagcactcagcggaacctgtagaagcgtcgggggttgccccgcttctgcgaaccgccctgggatgcgaggttcagcgtcactatctcatcctgggaaaggatgagatccgggtgggccgaggctgcgtccagtgtcacaggggccgtgtgaagatgaggagaaagaggtggccaaccccgggtcaagttgtccaaaccccctaccttcctctgatacccccgtcccaccacccgccccgctcgatgccgccagagaggctttctcttcccagtcacagcctttgtggtccccagagaagtcttaggcccggccccgcctcctcctcctcaaagttaatccctaaatttcacaatgtgttgttctgtgggcgcagagagaagttcttcattggtggtggtggtgagatcatttcaacacccgaagatgagaccatctcttccttgtccatttcccgtggcccctaattcccatgtctaagacaagaattgagtctagtataagaggtgtcaaggctcagactttctgagggccagtaattttctaaagtggagttcctcaaacacagggatgagtgaaagtgttggaatacaaaaggaggaatagtcatcccccgccacacacacatacacttttactaggattccacgttcagtcgcagtttattaaagttagaagtgtctccatccaccccctacagaggcttgcgtggtggttccagtctgctaaatatttcagaatggggacctcattctatctactgatttatcaaatctcattaattaatttcccttgctgatatgaggggttgggagagaagggggacgtgggaatgtaaggaagagcgagagtggtcgggctcatggggtttgatggactgtgacccaggctggcgttgctcgtctctggatttcactcctggctgaactggtgccttcggtaaacagctgcttaaagagtgcggggactgctgcagggacttcctttttccactaggcggcaccacagccaaagtgataagaagtcaagcgtggggcgggtggctggagattgtctcttcccctccttttgctcaagaactcgtccattccttctccaactctcttcaccaccacccccgcccccatctccactctcagtagcccgagccctcccattctccactccttcgacccaattccactaagtcaagaaccgtggtcggtctcagccactcactcagcgccactctatgctccgaagtccgtggagcaccaccgctccccgtgttctctgagctggcttagcttgaaggaaccttacaaaaccaagcccggatcgctgtcagccactcactcagtgccgcatggagctcctcggacagcgcaacgtcaaatgtcttcgtatcctgagagctcgctccttgaccagaaatctcatcataagaggccaggagacatactggaaaagtgactttcccagcagacgaggcccgaaacagggagtgggatggggctgaagagtggtgatttggtggccccgatgtagttctgccgcctttgcgggagaaggaaaggagaaaagaggtcagcgggagcacctcggcagcaatcctccattgccagacagcacagctgagctctacatacagcaggagggatggaggtgaaactcaagaaagtacacctgaacaagtcggagcgccctctgtttcctggcagaggtgtaatttggggaggaactgaggaaatggaataaatgaattcattcatttattcatttattccatttagtggaattgggtggatacagcattttgaccacctgtagacttagaggtcccttagtattcagagacaggactcttacctgcagaagatgacccgggctctgaggttttgttcattttatgattatttttctgtaacaagccccctaaaaattggggagagaaaacctatttggtcttgataaccagaagctgcaaattaaaaacaaaaacaagcaccctgccatcatcaatcagaacagtcaatggttctcagtgggacccattccccacccagggggaagtgtggaaacctttcaggttgtctcagtgacaacaagagtgtggttctctactggcttatagggctttctggggcctgggatactaagcatttaacagggcaaaagtcatggagcataacaaagatggcctttctaaacaccggtagctccttttgtggagaaatgctggtggaataggatccctaaatcctgctctctggctttggaatgcattctgtagtttctggctttggagaaaggagttctaattctctctctttcacttaatgatcatatgacctgggtaacttacctcccctcccggaagctacatggacctcactgtaagttgcagataataacacctatcttggaggatagttgtggggttttgaaatattagatgcgcacatagtggtcctttaagaaatggtacttctactgttattatcttaggtggcagaaccatatctaatgactttagcacaggctgttattacagtgggtctccatcccctgagctgtactgacctcacacccagaggagtttgcctcgaaacctggtgccctgtaggggcagcaaatactacagaggtggagctgcctccttcttgtcccactttttcctccctgtctctaggagtgaagaaatacatttgcaattttctattacttctgaatacttcaaagtttgggattagtgactgttttgtgagttacctgagtttaaaataataaaacaaccatatgcctgttctctcaattggctgaggaatcggcattcacttatatctggccttcatgtaatcatagagacacaattcttccccttttctcactttccccaaatggcagaagcaaccaaccatcatttctcacttacagctcttcatgtcatttttattcatgcttttgaagaatctgttttcatcttttttcctatcagcctggagttggtctggggaataaagaatgggatgaaatggtgagagtccagaggggttgagcaaagaactcactatcacacagcaaggcactaatttgaaatgcctgggagaagtagaagctgcatttgactctcatattcttattggaccaggaaggtatgcaacccttgagagatgccctttctgctttcctgtggtgactgcctagcccagcactgtccagtatgaatgatgaatgtaatctgagtcatgaatgtgagccacttatatatttttaaattttctagtagtcacatttaaaaagtagaaagaaactagtaaaattaactttaattatatattttatttaactcaatattctcaaaatgttatttcaacatgtattataaaaattattgctatcttttacagtctctttttacactcaatcttgtgaaattaatgattcttcacatatagcatgtttaaatttggactagctacatttcaagtgcctgtcagcacatgtggctagcagctactaaattggacagtgcagagctagcccctttctcactgcctgacaaaggtaggtgctcaggacaaagagtgccttgaggcttcaccctttagcttcagaaggcctactgtagggctaaccacccaggagccaggtggggtaagggggggccccactctcctaaagcctggatggcagtcctgccctctttcccatgaaagagggcttgagagggggaacgaagacagagctcctgcaaggggaggccgagtgccttcatctcccagttcacccctgccagaagagactccttttgcaggtagaggatgagcccagaagctggggacaatggcccattcctggcctagatttcctgtaggggtgctggactgagtggagaactatagggtggagcccctagatggggagctacttctggccccagcacccttcccccagtgtcttgcagccccaagacagcacaagacagcctggggctaggtagtgggacaagcgtgggcagcttccctgagagccaccagcccagtcatggggactgctcagcggagacgcgggggccctcttaggaggggtctgcaaacctagagcataggaaacactgcctgggagcacttcacctacaagggcctttagcagcttcagggcccagccacacccttctccacgtacgtgttccagacccagtcaccccgagcagggagaaccaaccctcataataagaactgtggagattggacctgtggtataagtagactccctaccacctcctgtatttcctaggctttaatagggccaggtggccattgtgccttcttctttggggtaaaaataaaataaaaataagagaaaaaaaaaagaaggaaatagggccaggtgggagttgggggactgtgtgtgtgtgagtttgtgtatgtgaaagagggaaagaaaagggggatacagagtagagcacaccagtctccccaactccaaacctgatgaagtggaaagggctgggctcctttattgaaattccaaactagaaccaaactattcttgacctgaagagcctagaaaggtgctggatcgggctggacgtggtggctcacgcctgtaatcccagcactttgggaggctgaggcgggtggatcacaagtcagcagttcgagaccagcttgaccaacctggtgaaaccccgtctctactaaaaatacaaaaaactagctgggcatggtggtgtgcgcctgtaacaccagcgacttgggaagctgaggcaggagaatcgcttgaaaccagaaggcggaggttgcagtgagccgagattgcgccactgcactctatcctgggcaataagagcaaaactccgtcaaaaataaataaataaataaacaaataaataaagttgctagatcggctgagatcatgcccagtggggtgggaggagctagacaaagcagagcagttagtggacaaaagaaaagctcagacaacaaaattaagaataaaacaaaacatgctttcctgtttatgtctgccgagtggagattcccggctgaatgggtggagatcttggggcattgccctggtcctcctttgccgtagtcccaaggggaagtgtttgtgtatggggggctgggggttggggtgggggaggtgggtgtggaactccaggtgataatttcagaagattccatctagctgtctttatgcccaccttagaccaacacagtcttcacattaaggggagtccttacaaatactaacccttcttcctagttgcaaacacagaaaggtttatgaaaaatatctggccgaacatctaaaacccaagtcatccactactgttctgctgatttctgtttccctgtaaggctggaagaggtttctccccagaatgtcactgattttgaatttattttctcttcttctgtaggcaggaggagacaccagtgtgcaccagagaaggagaagtcagagatgacagtccctgcctgaggccatctctggtccaccagacaactcatcaccaacttcccaacagccactgctctaggccaggtgtccacatggggaataggtccaggccctctatggctctcgcaggagccagggaggcagataaataacatatcacgaagacagaatataagaaatgcctgggaggaggcatactgatgcgtggaaagtactcagccagaagcctggcactagaagggcccagggattgttggcatgtatgagtcacagttccatttcagtggagtgagcagggagagaatctcctggaagtaggtgaatagagaaaatacagcctcttccttacctttgaattttttcaggctccctgtgatggagtcatgtcttgattttgcttcactgagttttttctccagttccagaggaacaggggttgggttgagaaactgaaactcttcacttctaggaagatgtggttgagctggttggtgagatcaggggatgaggtgtgggagaaggaggatctgagatatggggttgagaaatgaggggatgaagacctgggggtagaactgagagcggtggctcacacctgtaatcccagcactttgggaggctgaggcgggtggatcacctgaggtcaggagttcaagactagcctggccaacatggtaaaacccggtctctactaaaaatatgaaaattagccaggcttggtggcaagcgcctgtagtctcagctacttgggaggctgaggcaggagaatcacttgaacctgggagacaaaggttgcagtgagctgagattgcaccactgcactccagcctgagcaacaagagcaaagctccatctcaaaaaaaaaaaaaaaaagaagaagacctggcggttaagggatagtgagctgggagtcagaaagtcagggctagggatatggggcaggagtgaggtagggcatagggagatatggaaatgaagatgggagatggagacagagaggagggaaaaaaacagggtcagggagacagagtaggggacccaggagctattcagttgagcaagggggcattcaggaaatagtagaatctgtgctgaagaaggaggaaggctgagaaaacagctggtttctttaacaaccaaccacgtgctaatatggttggcataggcattccccggctgcagcctaaatgtatgaatgcagagttagaggtgggtgggtatttctgagagaggaatgttgactgcatttggatatacgctgagaattgtatgtggatgaatcagtaggcaaaatacatttggggtggcccatcatacctgcacaagacgactttgatatcctagaagagaaagagaaacagcacagcctcagcacttggctgattcccaggagccaaggaggagatacagagcctgctgggtgtggggcagagcaggaggagtaagaacccctccaagtctctcttaccccatcctcctcccctctccccaccacgaagggcttctccaagaagcactgctctgccagtaagcagaaaagtgttttgacctcaagaagaactgagtgaagaagagaagagtgagatttagaagatgaatttggctctgagactgaacaagggagccctgctagccagggcaggagaaaggctagaatggctttgcatgatctttcttaaaataaataaataggtttttgaacctgtgggagaatagatgacttgaggaggaatcatctcagcttgttttaagcaccagctagacttgcactgtccaatatggtagccaccaaccacatgtggctactgaacattggaaattgtggctagtgtgacaaagaactgaatttttaatttcatttttactaattcaaatttaaattaaaaatagaggccaggcacggtggttcacgcctgtaatcccagcactttgggaggctgaggtgggcagatcacttgaggtcaggagttcgagaccatcctggccaacatggtaaaaccccgtgtctgctaagaatacaaaaattagctgggcgtggtggtggggacctgtaatcccagctacttgggacttgggcctaggaggcggaagttgtagtgcgccaaaatcgcgccactgtactccagcctgggcaacagagcaagattccatctcaaaaaataaaataaaataaatagaagaagggtaaagtactttttccattaaacacaactttattgatttggtaagactatattttactttaacaattgacaatttagcatctgaattgagatgtgccaaagtgaaaaatatacacacaatttcaaagactcagtgtaaaaaaaaaaaaaaaaaaaaaaccaccaaaaacccagaatgtgaaatatctcattaatacttttaaaatattcattacaggctgaaaggataatatttcagatatattgagttaaaatattttattaaaattaatttcacttttatcattttaatgtgactaactagaaaaatttgtaattccatatgtggctgaaactacatttctaaatcacacatgtggccagaattatatttatgaattacatatgtggctcacattttcattctaatacatgcggctcacatattgctattggacagcactgggctagaggtaggatggttggggcaatctcaggtattctgccagtggtccatgctctgacctgagactagggatgggctgctacctctctgcaattctgcccccaagggactcacctccagcagctgcctgggtggcatgttctgcttggtcttcagggaatcaatgagcttcttgagatcgttcaactgtggctcagtggaggcaacatagtgtttccctgcttccgttccctcatgacccagccagtaaatccgtgatagcaggaaattcttctcctcctctaggacttgatgcaggagttcaaattctgtgaggatcctttgcttctcatgttctacctggtcctaagaaacagggacaggcagagggtgagaggatggcctcgaaggtccttctagcccactttattcagccattaattttattaagtttgtgtggaattcccaaccagagcaatgtgccagggcagacctggaagaaaggaaaggagaggagaacaaacttctaaaagcacctactacgtgctcagctttaagcgaaattattaatttatggtttaccacttgccttcaaggaactgtctaatacaattccagaaggcttttcagtttataatctttcatatagattttattcctttcacgcacacaggaaaataggtaagtggggtcacaatgtcttcattttccttctgtcttttttttttttttttttttttttttttttgagacagtctctcactctgtcactcaggctggagtgcagtgcacgatcacggctcactgcaacctcatcctcccaggctcaaacaatactttcacctcccagcctctctagtagctgggactacaggcgtgtgctaccacgcccggctagttttctttctttttttttttaattaagaggagagtctcgctatgttgcccaggctggtctcaaactcctgggctcaagcgatcctcagcctcccagagtgctgtgattactggcgtgagccaccgcgcccggccaatgtcttcattttctaactggggaatccgttgagggcgcagctcggccttaaaaacctgtacttgcgattctaagaccagcgcgggttttccgtgccccaccttgtctgccggtggagactgagcagtcagcccgctgtaatagcgaggccgacgcgggaggtgatgccgcctggccggtcaggtgctgaggcgcagaggagaggacatggctcactggatctttttctgaggggtcagtgtaataggggattccaggagctttggcagagatgtttctgcttccagagatcgtgggatggagtttttcttaccgtgaagacatcgaccctgtgtacaccttgtgccttcacttgtactgtctccttctccttttgctgcaagacttggatctgctcttgaatctgcccctgcggaaagagggccgtttggacaggctgtgcctggagatttctggcctcataaaatcctcctggtctcttaggagagctggtgacactctccaggtgagtccttgtgtaattattaaggactcgcctttctcaagctggcggggaaaggggttgctgagaagggagaaatctggagcctaagtgacctaaatgaccagaacatagttatttatgactaactaggactatggatggtgctttggaattatcaaagaactacaaacttcccttcatctgtcctaccaacaactttaagagagttgttttgtttttgccatttgaaaggtgaggtacctgaggctcagagaggtaaagtgattccttgcaggttgtacagtaaactcacaagactgggcttgagcccaaaccttctgagtcaaattttcacatcctttccattctccattgcaccttgatttagagagtcagccgttccccagactcagctctttgaacccactgtgcctgactgcgagctgcccactcaagcccaaggggtgggggcaatggggtgcaaaccctcagtgggaaggtagcagtttccagggcctcactgaactcctgggctgatgggggaacagggaagaaacctcaaatgcctacctgataattctgggcagcttcttcgatcaagctgacattatgggatttgtggtccttggattcacgacacacaaaacagaggaacttcccatcatcctcgcagaaataatggaacatctcctggtgcctcgggcatgtagcctctttccttttggactgcacctcagaggcttgtagagcttggattttctccaccagattccgcaacagcgagttgaacctgattgcgttcttccttacggaagttttgcagaggggacatttgaaaaatccacatgatgtttccccaatctgagtgatgcatttgaggcagaaattgtgcccacagtcaatggtgacaggtttctgcagaatgtccaggcagatggggcagatcacttcctcttgcagtttgttcacaaactgcccactggccatgacagaacaacagggctgtttcaagactgtaggaagctgtgccaagtctgtaggagccccggagtccactgtggatactgtttctaggaagggagaagggagtcagagaaagtggaggtcagagattctgccaattagttagaagagcagagagagaggaaaagaagagggagaaaaaaataaatgatagaaaagcgtaaaatttaggatctagaaaatattataaagagaggaaaacagatgggcagtcctaccttgctacctcttgagaacaaatggatactttgaatgtgtaataggctgcttataaagtgaaataagttgtcctgaactttggactaaaggtatgtttgtatggtggttgactaaaatcagaatgaccggggcaccaaacaccacttatgggggatttcccaatcagctctgagtagggagtggaggggtgggtggtgatgcctactgaaaggtcacagccagttcactgcaatgctttgggcatcttgtatgcaaagttcaagccttggtagagcatctggaaagtaggggaagggcaattctctacctcaggtgctttggctcctcacagaattttgtgaaaatgtagaggttatcatcacctaccttggggaatttccagtcacagggtcaaccaaccactctctagctcagtaggataggcaaggaacttcctttctaaagagttgttctttgtttttgcactttgctcttgcccctggtgatcttctgcctccccacaacacctgtagtagtctgtcctctgttgattttttctctgtatgtctccagtatgctggtgtctccgtgcccattctttgctttgccaattctgtctatatgttcttcttcttccttcttggtgcttctctgatccctgacttgccttctatggcttttgttatgactaggaatatatcaaccagtgttacatacattcccttctgtacattcatgtcctaaccttccctccttgcctcttgtcttaaggaaaagggtgcttcctccctaccccttctcttggtatagcttccaccctcacctcctcactctccattatcagccgtctgtccccagcaagaagtacaccattaatttttgtctgatcttaatcttaggtcaaacagggcttgtggatgattattataataatagccagagtgatcatacactctgctttgcctggaaccatcctgggtttcactttgtcctggtgtaattattaatagcacctcctttcactttcagaaatgtccagtttggactataaattatgtggctccccttatagcaactgctgtaaaccaaagactttcagaaatgttatacctccagacctttctttttgtttgttttagggttaaattaaaacagtctaacatctgtaaattgttttacttatactcctaaactgctggcccctagaagcagaatttaacttttgacaggttttgtttgactggcatgatgatttagaaaataatgataatgtagatgcctttagagagggtggctatgttccccaccgctctgctacctcacgtctccttggcccttgaaggcatttgacattatgactctgatttatagatttattttgcttatattacctcatttaattctcacctgtaagaaattatctttatcctttctcaaaaaaggaactcagtattcttcagaatcacttggaaaacttgttaaaattcagatttgctgaactccagtagagactttctctttcaacaggtccttggtggagcctgatgattgacatcttaagcaaattctctggagaagtcgatgctcctgatggaggctcacacattgataacccctggtttagagacactactaattgttccagctcatccagctaataaatgacagatctcagacttaattccaggtttcctattccacattaagtcttctttattctttcttgtttcagcattaatgaaaacaaatagtaatctttaaaaatgataaacaaatattttaaaagaacattggtatttcaatgaagctgggcaacccagcagagagaatgaaaatactcatatgaacaccactggagagtttcaaacaactgtcaccaaacaggtactgatggcttcatgaggaaggaaatttagacataaaaaatgagaatctacagtgtttcaaaggtgctttactctctcagaattattattgttatcctgggtcatccatccactggactgaatggagatatatatatacatatattttttttctttcttctttcttttttttttttttgagacagagtttcactattattgcccagactggagtgcaatggcgtgatctcggttcactacaacctctgaatccccggttcaagtgattctcctgcctcagcctcccaagtagctgggattacaggcacctgccaccacatccagctaattttttgtatttttaatagagacggggtttcaccatgttggccaggctggtcttgaactcctgacctcagatgacccacctgcctcagcctcccaaagtgctgggattacaggcgtgagccactgtgcccagcccttgaatggatattttaaactcttagtaggctcagtagtctgaaaccaaatgcctccaatttgcaagggctagggtcttgagatagttggtattgtgttagttccaaaggacttccaagccaattctgaggcatagagtttataaaaattagccatagaacaggaaatgatgcagagcctcatgcacatgagacagctgtcacacacaagaaagcagacacagagccatgcagcagcgagtgcacagatctggaggggacctgccaagactaatgggatgagacaccttatcagaggccagtgaaggctagaggcagctcagttgtcagactagacggccccacaaagttacataagcctccctgcatcacgattccagctacagaagcttcccctgcctcaggattcacatttccgggcctatgtgaattggtagaatgtctatggaggaaaataatgtgatatgtttcaaaactacaaatgctcattccctttatcccagaaattccacctctgggaatttagtctacagatatacttacacatataaatttattttggactttgtggtaatgtttgcattagcaaaatattagaaaacaatctaaatgtacatcagtatggaaatgtttaaataaattatagcccagctttataacagaatagaaataaaaaagaatcagggacttccttatttacatatggaaaatatggccaagatatgttgttatgtgaagaaaggaaaaaacaaataatgcagaaaaatgcatgtactatgctaccatttgggtagaaaaaaatatacttattttcttgaatatccaaataagttctttctggaaggataagaatttaataactaacaatggttgtctctaaggagagggactgactagccagggaacaggggtggaagagaggcttttctttgtatgacatattacattttgtgaatttttaattgtataaatacattaagtttttttcttttttagtactttttacattatgttttacaacattaaatagtaaatcaaaaaatggacagagaatgaaatggacatttgcagagcaataaaaccaattaaccaataaatacttgaaaacagtaatcttgaaaatgcacgctcaactcattggctcattcctgtaattccagcactttgtgaggccaaggcaggcagatttcttgagcataggagttcaagagcagcctggacaacatggtgaaaccctgtctctacaaaaaatacaaaagttagctgggcatggtggcacgcacctatagtcccagcttcttggaaggctgatgcaggaggattgcatgaacctgcgaggtcgaggctgcagtgagccgtgatcatgccactgcactttagccaccctactgcactccagcttgggtaacagagcaagacgtttccttaaaaaaaaaaaaagaaagaaagaaagaaagaaaaagaaaaaagaaaaaagaaaatgccaattaaaataaaagaagatatcagtttatatcttaagtttaagtctggaataacaaatatagccaaggacatggagaaataggtactcctataccctactggtgagagtataaattacaataatttaaaaatatttagtagaatttaaacggtgtactttcatttcaaggttctgtaatgataatgatgatgatgaaaatactgctaccagtaaataaaagctaacatttcttgaatgcttaccatgtgccaggcacagtcccaagcattttgcgtattaactcatttatatagagaagtattattattcccattttgaggacaagtcaacggagatcaagagagattaagcaatttgccccaaaggtcattcagtaagtaaatagtggaatggggacttgaacccaggtagcctctagagccttcttacaccctgtatgattctgcctctctagagaaaaccttgcacatgtgcactcagagatgcatgtaacagtattaatattggctgggtgcggtggctcccgcctgtaatcccagcactttgggaggctgaggcgggcggatcacgaggtcaggagatcaagaccatcctggctaacccggtgaaaccctgtctccactaaaaatacaaaaaattagccaggcatggtggccggcgcctgtagtcccagctactcgggaggctgaggcaggagaatggcgggaacctgggaggcggagcttccagtgagccgagatcgcgccactgccctccagcctgggcgacagggtgaggctccgtctcaaaaaaataaataaataaataaataaatcctatgtcagggtttttcaatgatagcactgttgacattttaggctggataattctttggtgtgtggtggccctgtgcactgtaggatgtttaccagcatccctggcctctaccactagattccagtagcactcctatcccccagttgtgacaaacaaaaatgtctccaagcatgaccaaatgtccctgggggacaaaacctctgatggaaaaccagtgatctgtatgtagtcatatggctaggtctcaaaacagtaatgagtatgtggtgatttatatacacttagaaacacacaacacttcatatagtttgcagtttccatatatgtgatagaagtttaaacacaaggcctgaaaggatacatactaaatttatggcagtgtttgcttccgggaggagagagagaaagagcgagagaggaatggaactaagaagagaactaaatggacagagggaatctcaaatttttttgagattaaaatttaaaaaattaaatctgtaatatttaatttttaaaaatctgaggcaaacatagcaaaatgtttgtatttgttaattctaggttgtggttataaggtgcttgttatatgattttctattattttctatattaagtttttccaaagtaaaatattttagttaaaataggaaaaatgttgaaaatgaacaatggatagaaataaaaatagaaattcagaggaattctaaaataaattctaaaattaagaaaaagttcaactcctttcctactactcaggaaaatacaaataatgcgatacaaatacaaaaatgagataaactttgtactcatcagattggcaaaatttttcaaaaatgtccagagctgatgaggatgtggaaaaatgggactcttcatatgtggctggtttcagtgtgaatgggcactatctttttcaaaagcctcaaggcaaatgacttaaaatgcatttgaacggtgactagaaagaatattataagaaaagtaaaatgcacacaggatttcaaaagggtttttaggcttcaagataagtcagggacggtggggtcgaaatgaagtcaagggacagcttacacagagataccctataaccagtctcccaacaagagagctagattttatttagttaaaaatagaaattagaaacaggaggtagtaaaaacagggttttcttcctttctttctttttttctttctttctttctttctctctttctttcctccttccttccttccttccttccttccttcctttcttccttcctttctttctttctttctttctttttctttttctttttcttttcttttcttttcgagacagagttttgctttggttgcccaggctggggtgcaatggtgcaatctcagctcactgcaacctccgcctcccaggttcaagcgattctcctgcctcagcctcccaagtagctgggattacagggctgtgccaccatgcctggctgatttttgtatttttagtagagacagggtttcaccatgttgatcaggctggtgttgaactcctgacctccagtgatcagcccgccttggcctcccaaagtgctgggattacaggcatgagtcacagcacttagccataaaaaagttctgtttaaaataccagaatgattaaaatgtttgctttctgtttgcatgtatatcatcccattaaaaatgagtttaaagttttctatagagatatatacatgcaaacagaaagaaaaaaaaataggagggccatcaaaataaatggagcaacaaagttcagtttatatatagcagtcaatataacattgggctgaattgctcaaccaaaggatcagtcatgagattaaaaaccccaacaaaatgtaaagctccctttcttccttagagaaacccattaaaacatagaagcataaatccagagatagtttaagggctgctgtgcctgtgcagatgggagaacctcatggtggtctcactcctctccctctgccaggagaaactgcagtctcctaacaccgcgactccaacttaggagcaagggcagggggaagaagctgaaaaggcctggccttcacttgactcagttatccagattatttaaattattggattggccggtggaatggttaattttatatgtcaacttggctaggccgcgctacccagttatttgctatggttatgctgcttctacaataaatgacatcagagaaaagtggttgagagaaaagtggcaagaagaaataaaaatatgcttgggtttgaggatctaaatgcccccatcagaacacatcagactatgtaatattcttgtaccacagaagtaccgtgtccagagcctaacacagagctcttggtaactcactctgggaagcgcattttaataaaggtaaccgcaaactggactgccttgagaggaggtcacttggatggcaagcagttttgaaatctcatttcaggaggcatgaggaggatctggttggccctgagagactcaggagtacagagtgctgccttccagatgcggggaggtttgtggtggatgtctgtctctcccatggtctcaacacttctatgcagatttccgcgggctgaattgtgtccctctcacccactgctccaaacttgtatgatgaagccctaactccaagaacctcaaaatgtgactatatttggaaatagggcctttgaaagttgattaaattgtcgacaaagagtcaaactctataaaatattcaaagagatgtattttgagccaaatatgggtggccatggcccatgacacagccctcaggagatcctgagaacatgtgcctgaggtggttagggcacagcctggtttcatacatacatttttgggagacatgatacttcaatcaagtacatttaagatgtacatgggttaggttcagaaaggcaggatgactcaaagtagggagcttccaggttataagtagatttaaacattttctggttgacagttggttgagtttatctgaagacctgggatcaatggaaaggaaatgtctgggttgagataaagaactgtggagagaaaagagaaaagttccttttttttttttttttttttgagacaaggtctcactctgtcacccagactgcagtgcaatggcatgatctcgactcactgcaacctccgcctcccaggttccagccattctcctgcctcagcctcccaagtagctggcattaaggcatgcaccacctcgcctggctaattttttgtatttttagtagagatgggatttctccatgttggtcaggctggtctcaaactcccgacctcaggtgatctgtctgcctcggcctcccaaagtgctgggattacaggcgtgagccaccgcacccggcacaaagttcttaatgtgcagaggaagccttcaggtagcaggcttcagagagaatagattataaatgttttttattagactcaaaaagggtgccagactcttgattatctcctggacctgaaaaaaagggaaaaggggattctctatagaatgtagatttttcccccacaagagacaactttgcagggcaatttcaagatatggcaaggaaatacatttggggttaaaatattttgatttctttccttatttgttatgtaatgttatgccagagccagtttggaaagtaggccacattagggttaaataaaacccctctgatgagactttacggtttgtagggcatgactccccaggccccttaggtagaaatttgggcaagagaaggaaaaaggtcagagtttagtcctcagaggtaaaataagcccatcagagcggacctttgtctaatctgactggcgtcttcataagaagacgagatttggacacacagaagggcaccagggatgctccacatgaggaaagaccttgtgaggactcactgagtagacggccatctgtaagccaaggagagcggcctcacaggcaacaaccttgatcttggactttcagcctccagaactttgagaaaataaattgctgttgctagagccacccagcctgtggtactttgttacggaggtcctggcaaaagaatacacagatgaactcccatatcaccgcagagcccaccttccatccccacaaccccagttctgagtttccagctcttcgcaagggatctcccaacccttacacctcctactggatggagcagtgctcatctcctcttctctctattgcaaacttcagtgcaggcactccacaatcctgcagctgcaatgtgagccagtttagcccctctggactgtgtgtgggcaatatacaccaaaattattttaaaatgcacctaagaccgtttggcccagtagtttcatgtctaaaagttttccctaagtgaagccatcctcacagggttaacaataattctggacagaaatataattataattaagccttaatcagactgcactttgactcacttccttgaaaccaaaagtcatgtaacactagacactgaccagtcatatccccattgttgctctaggtaggatttctgacataagaatcagccaaggcaggaggattgcttgaagccaggagttcgagaccagcctgggcaacaaagcaagatcccatctctacaaaaaaaattattaattaaaaaaatttttttaaagaattgcttaagcagatcctgaattttagtagaacagctgatgacaactagtttaagacctccacaaaggaactgttttctcaacttgataatacagcttcttcatctccttgtcccatgacttcaccctgcactcttcagccagtcactttggccaactccaaaatctttaaaatctctagctccaaattatttggggagatggatttgaagttcccttccatgtcctcatttggcggccctacgattaaacctctttctctgctgcaaccaggtttcagcttactgactttctgtgcctgttgggcaacaaatctgttatggttacataaggaagtaatcaaaagcatatatagtcagagaaaagaaaccagaaggataacttatttgttcattacaatggatacttattactatgtgacaggcataattctaggcacttttattacagtgaataaagtatacagaagccccacccactgagagccaggcagtaaatcagctaaccaaatgaatcatacattaggaggaaattttttttttcacattaaggttctaaggaggaaataaatattatggaggaaaaaataaagcagaaagggagtatgaagagcagtcgatatggttccagttttcaatagagctgtcaaaataggcttgagaaggtgaaaactggcatcaacttgcaggcagttaacagtaaggtgccaatagttgttattgctggttggtgaaattatgggtaattatattcttttatacttttctgtgctttccaaatgcagcacaattaacatatttgcttttacaattaaaaaaatcccacaataaatgttacttaaaaaaaaaaactgacaccttcagttgttccccattttctacagaataaagtccaactcgtcctccattggcctcttccctttcatctaaacttatctttcattccttaactgtcttttccagttggcctgataccctgtgacccagatttgccaaacagggttgtcagatttagcaaataaaagtacaggacacccagttaaatatgaacgtcagataaacaatgaataatgcaatatttgagacatactaaaaaactacttgttgtacatctgaaattcaagtttaactgagcatcgtatgtttttcctgacaatgtgacaagtgatcttccttcccctgtgctggaataatctcttttccatctttccaaatttttccagctaatcagagggtggggaggagggatggatgtgggtgggaatgagagataagcctgcctatcaactcctgtatttaatataggatattcctgggggccaggtgtggtggcttatgcctgtaatcccagcactttgggaggccaaggcgggtggatcacctgaggtcagggggttcaagaccagcctggccaacatggtgaaaccttgtctctactaaaatacaaaaattagctggatgtggtggcgcatgcctgtagtcccagttactcgggaagctgaggcaggagaatcacttgaacctgggaggcagaggttgcagtgagccgagattgcaccactgcactccagcctggtgacagagtgagactcctcaccaaaaaaaaaaaaaaagaaaaaaaaagatattcctggggagtagatgggtggtggagggcgggggaacaagggtggggtattgttaaaacatcgtaaaagggctccttttttgatcttgaattatgactttcctatagataaaaattgcacctttaatcagagaacaatggcccaggtgtcaggtataggtgaaagtccaaagttctcttcagaaaagaaactctattttagttatacagaacatttattcaaatcttccactatttaatttatgtaaaatatcctagtcaatgtttttaacccgagtgtttttaaacattgctttttaaaaaataaaaaacttttaaaatattgaaccatttacgggggctttaaaaacagacagcttttgttccaaatgaggatgcctctccttccgtttgtctgacctaccctttgcccccatggtcccctactccatttattagctccacagagacctgacagaaccttaaagttgatccctgagtcagactgggcctgtctcaaggtcagctcacatctgaaatcaagcctctgctgagtctgtggagtaaaaggctgatactcccttctctcctgcaagacagctgtgtgctctggcccagagtgggcacagaactgctgggcccaggctgtcagaaacttctgggctggcatccagctgctccaatgcacaaagccagctaacgcaggccaaccatgccagtgagtccacattacagaaggacgggaagcagtgggatgcggtacccaggggtagcagtctaatccctcccaaagccaaattctagaaaaattttccaaatttaaaaaatggaaaagggaaaaatggaaaatggaaaaaattttaaatttaattttccaaatttaaaaaatggtaaaagctcttacccatggccatagtttttcatcttgacatcctcagcacttaccatggtacctggcacaaaacagctaatttttcagttgccatactgaacagccattttatacaggctctctatattccaatgacaacaatctttaggcaacattgttaagtgacagaacagtgtttagtatgcaaaactttgcttaataaaggggagaaataccaatatatatagttgtatttaacttctatttacataaagaaacattgaaaggatacgcagaaaactaataaaagtgtgtaccggtgggccagggacgggggtagtggtaggtggaatgaatgaagaagggcaaggtggtcacagtcctacttaatctataccttttaatatattattttttgagccaagtgtatgtataaccctttaagttacatagttaaaatcatctatttttggttatataattttgtagtagcaaaaaactcaactgaaaaataggaagctattctctccatttctctctgtggtcacatagccgctcatgtttaattctttctaagctcacagattgaccaacacagccaccatacttgagtttccatgactttataattctagtgcccatcactgtctcaatctagatttccttttccccaaaaaaaatctgctacgtcacttgctataatttctagctctctgccaaatgtttcacacatagcttttatccttttgaagatagcatatacattgttatatagtctatgcccaataaccccagagtctggaagccccatgggtctgattctgttgtctgtttttatttttgtttttttttcttttcttttctttttgagacaaggtctggctctacggcccaggctggagtacagtggcatgatctcagctctttgcaacctctgcttcccaagcgcaagccgtccatccacttcagccaccctagtagctgggactacaggtgtgcaccaccacacccaactgacttttgcattttttgtagaaacggagtttcaccatgttgtgcaggctggtcttgaactcttgagctcaagtaattccccagcctcagcctcccaaagtgctggtatggcaagcatgagccactgcacctggcctgtttctgcttttcttatggcaatctcgcctctctggggcttgattatttttgcttgtttgctagatgcatttgaggcctaggatgctattatcttcttcccagaatgattgtttttgacactagcagtttagagtcactttgaacaagttcaatggttacttgagattctctgggctgggacaccatttctactccctttaagcctttaaaggctgccaaaaatgcagcttggattcttaaactctcttcagcaaatgctcccagaacagaagcgaccccagttgcaggctcacctccatgttcctttcctttcccaaattttggcccagcaattcctcactaacctttgaatatttaagtaagatacttaaaaatattttaccgagcatttttagttgtcttcaaatggaggcttggtctgaattactcagtccattaatggaagcagaagcccttctgatgcaggccttagtttttcagtagtttgctcttctctgggccttagctttcagaaagattctcttgtctgtagtagtaaagtctgtataaagtctgcatggacttttcttgcgtacacacattgccacatcacctccagtcaaggctggaagagaatcttgcattttacacatctaatatttcagaagagctggagtcacagcagtcctcttcactgagctcagaaacaaaaccctgcttgtgcatatattcaggctgggacctctaaaatgcagacacctaagtgctccagctttgagaattctagcttcagtgtgacaacggcataaggagttgccctacggtgtaaaggcccctgtgaggtctcagtttgcagaccaggatgtgacaaggagattggagctgcagtcagctctagaggccgaaagaggagccaaacagcaaacagaggtgccaaatgctgccttagaaatctgtaagccagctaagagttctgcagtctcaactaaacaaaacttttttattccattggtttggggtgtactgttcttagggcttttgccaactgaattggtctgtggtgtcttgaaagattgggggtctgcacggaaaaggctcggaggccagttctctgaggctgcctttgttgcaggaaataaaatgaatctttccagagccacagcactagcatttggagaccactctcaggggctttggggcgtacgactttcggggctctggtcctctgtttccctatccgtagaatggagacggctactctgtgagaagcccgaggtgcgcaggacccaagtgaggagccggcaacctgaagtcctcaggatggggagggatccgaaggaggcggtgtgaagactcaagaggaccgccttggggtgggaagaggacagcccggcactggctgctggcccaggtgctgtgatgggtttcgtgcgcagagaggcctgacagcctctgcatcagtgaccgggcgaagagtggggcagctcggacggtggttggggaacgttagggagattggcgcgcggaccactgggtgagcgcccaggaacgccggacgcgcgccttcacgcccgggtgcctggcggcgttttagaaaagctgtatttgaaaagcaaccgattggggtgaaggcgggggagcggaatcctgattacactgtcccaatttcagttgaggtgggcttttaaaagaaatcccaattcacacattcgatcaggttagttacaagaaaggctgggaggaggtggggctggaaacaccagagggcccagatgtccgttggcgacggtcttctgcaaacgacagagcgcaagccttgcccctggaattctagagccgccgcaaagataggaactcaaaacgacccgagccccggagccgcagcccctcgggacggtcacgagcagagctcccaaggggaccgctggggactgggcgggggctctgcttctcacctgttccttctctatccactgagccctgacacgtaggaccagcgctactaacagacttgttttccggttcagctccccttagggctcctgttggaaaccgaccctatctggggagcctgtctgggccactcccattgccggagaactctcctggggcggggagatggcccaggtttgtggggcttgaaagcttacacagtgttgtgtcttttcaagaaaaaggatacagccgggcacggtggctcacgcctgtaatcccggtactttgggtggccgaggtgggtggatcacgaggtcaggagatcgagaccatcctggccaacatggtgaaacctcgtctccactaaaaatacaaaaaattagctgggcatagtggcatgtgcctgtaatcccagctactcgggcggctgagccaggagaatctcttgaaccagggaggcggaggttgcagtgaggcagtgagccaagatcgttgccactacactcaggtctggcgacagagcaacactccgtctcaaaataaaaaaattaaaaaaaaaaggaaagaaagaaaagaaaaaggatacagaatttgacaaaattaagaataaaagcaaatatgacttacaatgaggaaaaacaatgacagcaaatgataaatgtttaaaaactgacatatcacaaacatcaaaaaatccccccaaaattctaataactgcttgaaccacccctatattttcccatttatattttttgattccctcttcattcgacaacacttttgtaatgtattttcctgggtgagaatgaataatttggtatttcgtctagcatagttaagcaaaaaaagtttttattgaaagtttagaaaagttaatatccatttcacaatcgttattggtaataatatgcaaatttttagtgctattaattttggagaagcctctgtgaagagtttcctatgtaagcctgagatttcagggcatttcaagttttcttgggcagtgactaatcttaaatactcttttaagttgctgaaagtcattggcctgtttttcgttaagtccttgttgtaaaggtgtagtatgaaactgtttgtagatgtcaatattttatgccaaaacaacaagttttttaagttttaatgtgtttatgtggttaattcttcatcaagtgattgtcaaacaatctaggcatctattctatttaaaatgtatcccttcccttcaataaattgctggttttggctggaaccaaactttttttcttcttccaattccttttctgatgtcagaataacttctattaatttcatgtgcaaatatgcaagagatcattttatttcatgatgtatgtataattgtatatgcatatttaataagtatattcctaaagaagagagcttccattttgactagactttgatgagactgagtaatacgcttataattttctacatctaggggttaaaaggatttattggcttcactgtccacagacttctggtgcctcatgtcacagcacacattcttattgtgacagatctctgacctttcactttagtctctgatgtcaggtgagttatctcagtgggtggtggttcctgtaagccacttctacactgagacgggtagcaataacttgactatacatgaaagtgcttatgaaccacatatcctagtaatctcaaacaatgtaatcccaacttaatttccccttagctagaacccccacatgctacctgatacaagagaaactgtgacagagggaagttgacgtggaaggagacagtaatcctaaccgtggttaaaatatgttacttttgcaaattttacaaaacacttagcatgaccatattgaacacattgcttggaattccagggtcttggaaagaaccagtgcaagggatgaacttaatggcagagcttcctctgcacacttcacgactgcaacaggcttgtccctgaagtctctccgctggggtcccacttcaggctgacgtactgtctgtgtcaccgaacatcactctctgcatttgcttaccctttttgattcttccctgtgcctcagtttggagttggaagctcataaattcccctattatagggaagtggctgattgtgtaaccctatccttttgttgaaataggtgtgtccagttaagtatttactgtaaaccagcccctcatacgcattccactgggggtggattcattgctttctacaacctcgccatatgtaatgtccacactggtccatctggctgtgcttctcaagatcagctgttttgtaggacttgaaataaggattccttaacaacctggtgaatgcctaatagcctcaatacatttcaggctgttttagttttgtttatttggttttcgtgttttgtggtgagaacacttaaaatctactctctcagcaattttcaagaacacagtgtaccattactaacaaatcaccagaaggtacaacagatctcttgaagtattcctccttgaagtaactgaaactttgtatcctttgaccaacccatccccatgcccaccacgcccagactttggtaaccaccattgtattaatactgtctgcttctaccagttaacctttttacactctaagtgaggtcatgctgtattggaggttgtttcctccacgcgactgggtggaattcagaggttcctaccaataactcatttctttcaccagcagctcccaagggctctgctgagtcccccatgcctcctgaatctgagatcttgaacccctgctcctccccaaccctgtttttctgagaactgcctcatcaaacatagagcatagcaactttcctgagatttctctaaatttcctcttattcaggtcactgtgcatgacagattgactgcttgattcctggaagtctagggataaaaagtattgagtgctggtctaaaggacaggtttcagcagaggacacaatctcagagcagacaacttaagtttcagtattaggcatttccgttcttaaacattccttcactatttctgcccaagacatttctcactggtaaactttccttgttggttacctgccttctgcagccctgcaggctctgtctctctcctgggccacccctcttcctcttacacagttttatgctccccttcccttctctttccttccatcttcagtctacatatttcacggctagctttccacagccagatgtttcttgccctgaggaattatgctatcagtttttaagccaccgtttaaaagacggttgccagtgccctagagtcttggcaacaatgctccaccttccggaggtgaagcgaaatggtgtcctgtcttgaaagacagcgccacctactgtccatcaagagacagctgccgaaaacagctgaatgaccctgttcattgcctgttctggggagggtggcagataatccaggcaagaataattcgaaggtacattgaacttgaggtggtgatggaacacttaagaatgcacagaagtttaaactcaatagggatagtaataccaagctggcatcgggcctcagggaggttacaggatctgcatagtgctaacaactgtgcatcggtagaatgggaatctgaatccggacactccgcctgtgaagtccacgtagctccacctcgctgcactaagatagagtagatctccttttatggatgatcaaataagtgagagggaacccaggagccagtggagaggagaattttaaggaggggactgctgatgatctaaagtttgagtcatcagtttggatgtgaactgagaaaataccgctgggatttgagtttaggacttagttggagacccttagagagtggtttagggtgcccagccctgggataggcataggagagtatggaaagacagaaagacatagtcctatccctcatgaagctaaatgtgagccaaagccagggaagttggcaaaaatcaaatggtaataaatgagacggtgatttaggaaagagagatccatgtagaacctgcaggcccctctgacacctttgtgaaaattaggatggatcagttcactttcttggggccattgctgccctgagccagagcccacagcttggcaagcaacctctgggctaggtctcagcccccattcatcagaatgaagactgacttgttaggaaagtttcattcaggaaactgggacttgagctgggcttccactgatgtgaagggtttggagcagctgtgtgaaagaggtaggagttaggtcttccctgctgggaaatgtcaaaacagaggcaattaagagtcataaaggagagagagaagacaaaaatcacctgactcttggctccagtatttttaaagcatgagaaattagataagatcactcctttaaaacagttactgagcacctaatatattcaaggagctatgccgaataggctgactcagggaaataaggaccctgacagttgcgcattagtttgtagtttatgaagcacatccatttccagctatgacattttgtccactttcttgtaaaggaggctgaagttgtggctgcccctgaacatgaagctacaaatctccacaattaggaccataatccagattctttgactagtccagaattcctttcattctgaccatcctcttcttaaacattttaaaatttaggtaattgtttagatagatggcacatttgctggctcaaaattttaaaaacacaggaaaaagtctccctcttgcccctggtttccacacatctagtttctctctccagaagcaaattttactagttcattgatatattcttccagagatgttctttgcataaaaagcaaataagaatatttattcttccccgatttgtgcaaataatagcatattatacacactgttctgtaccttgcttttaaatttaatttatttttattttttaaaatcagtaatctatgtgtccaaagcataaaccaggcatgggcatagaccagaagccaagctgggataaacagggggttgctttgttcctgtctgatgtgagatgggcaccattaagcttttttttttttttttcgagacagagtctggctctgtcatccaggctggagtacagtggcgcaatctcggctcactgcaagctccacctcccgggttcacgccattctcctacttcagcctcccgagtagctgggactacaggcacccgccaccatgcccggctaatgagacagggtttcaccatgttagccaggatggtctcgatctcctgacctcgtgatccacctgtctcggcctcccaaagtgttgggattacaggcgtgagccaccatgcctggccaagcttttttttttttaatgtatcaatttatgttggagattattccaatagcaaaagttcccttccacaccccaccccctactaatggctgcacaatgttctattgtatgaatgtagctagtttatttagcttaacttccgttgatgaacatttgttttttttctaaaatttgaagcaaatgtttctaaaacattgatgcaataggtatatgcatatattatttcacatatgcatgaatatatatgtaaaatttctaacatcagaattgctggctcaaagagaatgtacatttgtaatcttggaggaaattctcaaattcctactcctctaaaggaggagtactaattggcattcccatcagcagtgtatgggagtgccaatttcctcacacacttaccaacactgtgttaccaaatgtttggatttctgtcaatctgataggaaaaatagtatgtcagtgttattttaatttgtattttcttcatgagattgagattatcttttaatatgctttagagacatttggtatttctttttctatgaaatgtctgctgagatacctctgcccaattttcttcttggtagttgataaattcttatttgcaagagctgtatataaaaggtaattagccctttgattttgatggcagttgtaaatatttttcttcttccaatggtatttcatcatttgtctcttgacattgcacttacggttttttttcccccatgcaggtcttttttaatgtggctgaatttatctttctttccttttatggtttctacatttgaaacattctcaagctactgctagttaaatacagtggatttctgccttcaagttgctcaataaaccagtaggaaaatcaagaaaagtacctaagtaactagtagaagttactatatagtcagtactataagttggtacaaagtgctgtttcttcatctgtctatccatacatctaattatcaatctatctttccatctgtccattaatccatccatttatcaagcttttactgaatcctttctaagagcaagaaaaggtatatatagagagatgacattttatggtaatgaagcccatgggctgggataagagacacccagatctgaatcccagctctatgtttacaccactgtggccttgggcaggttacttaatctgtccacatttttgtttcttatactatttcatgagatacgacaggaacgtagattgtggaggggtcaaggattgaaggttaaaaaacagacattgtcggaaatgccttaggaagagaactataagtgagtacaatgcctacatttataatttcaggtggtgaaatctgaatcctgacaaggtcaagagagtggccactagggtgggtggcaaaagcaaaggtcattggatgtgagcaggacaagaactgaaaggccttggtgttaaatgatcatgtacatagtctttgaaatcaccaggatcatggtaatttcacagccagatgaagggcaagttctgggaggatcctgagcacaggagcttctgtccccggtggagtgtgggatgtgccaccctcccagcatgtggatgcactcaccaacctggaatctctccaaacctctttgttcaggatcttacagaggttccattatttaggtatgattgatcaaatcactggctgttggtgattaactcagtccctgggctcctctcccctccccagaggtcagaggtgagactgaaagttccaaccagccaggcgtggtggttcacgcctgtaatcccagcattttgggaggccaaggcaggcaggtaacctgaggtcaggagttcgagaccagcctggccaacatggtgaaaccccgtctctactaaaaatacaaaatattagctgggcatggtggtgtgcacctgtaatcccagctactcgggaggctgaggcaggagattcgctggaacctgggaggcagaggttgcagtgagctgagatagtgccgttgcactccagcttgggcaacaagagtgaaactctgtctcaaaaaaaaaaaaaaaaaaaagaaagaaagaaagaaagatcccaccctctaatcacatggttcttctgccaaccagcccccattcttcctccaagagtcacctcattagcataaaccctggtatggttgaaaagggcttattatgaataataaaagatacactcatcagaacataaccatgtggtaagttgaggtgcatcaggaattaagatgattcaacttaaaatttttgactttatgatgggtttactggggtattgagtacactttcaccttacaatatttctgacttcagtgaattcactgggacgtaaccccatcataagttaaggatcatctgttcaagggttttaggagctctgtgccaaaactaattatatatatatctcacaagatcacacaacccacagcaaacagtggcaaagtgggattgagggaggaggctctgaaatgaggttttcaacaagcgtcttggacccttagaagtttcaagtgacagcccttattagtggcaccccttaggggctccctcaaactcaatgccaagactagcctgactggagggaacttagacaatggagtgggcatttgatgttccagcatcttgagtgggtgccattattctgtgacacctggatcctggggttccataagctggggttctaggatgtccattcttagttgagtctcatttcctgtcatatcgacgtcaaaggcccaagaccttcctcctccccttgagcaaacaagccacgccctgcaccaaagtccatctcaccttccagctaccctaggtaattttcctggtaattcagtgtttctaggaaagcatgagtctttccaccccccgccctgagatttactgacatatgaacacatatgattggcatgatataagaaccactcatctgctggccatctctccaggtctggagccagagaagatgatctgaaattgtagcaggagaaattgaggtaggatactaagaaagcttttcaggagtggggctaggcaagaggtgcagcatgagggaataagagtgaatcctcagtatctaagggaggtggcaggtggcgggggacttctttctttgggtcatctttggtggtgatttgacaggaaggaacaaagtggcttcaaacattatacaagtctctagtctgttctgtgtcctgttttctttctcattctttcagtgtggaatctatatgaccctgggagggatgttggttggaagaatgaccagctgatggagatgctgctgtaattattggtggtaataatgggcagcagtgagccacccggtgtgacagtgtaggagaaaacagtccaaactcctgccaaactctctctactgatggcaaatcagaggagactcaaattgtaagtttatagtggtctggcttttggccatgacaatgacaccttgcccttttaatttggggcccgtgcaaatattcactgaaagctgtcaagaggaaaacagaattggttattgaatcacttgcttcctctaggtgtatgaaaaataatttcaagtttaacaaacacaaggaaaccgcagggtccatgtcaaagctgatgagctatttctgaaactcgtgcagaattgtggtttgtgtggtctatgtcacggcacccttgagggagagtgggcaattgcctgaacttggaggctgtgtcctgtccccaggctgctccagggctgcctccttccgactgggccttcttatctgggactgttgagggcaacaggccttccgaagaccagtgaagaaggaggccctgcaaacaggaggctgacagggtaggaacgaggccatgatccctttgcagaaggacaaccaggaggagggtgtctgccccatctgccaggagagcctgaaggaggccgtgagcaccaactgcggacatctcttctgtcgagtgtgcctgacacagcatgtggagaaggcctcagcctctggggtcttctgctgccccctctgccggaagccctgttctgaggaggtgctagggacaggctatatctgccccaaccaccagaagagggtgtgcaggttctgtgaggagagcagacttcttctatgtgtggaatgcctggtgtcccctgaacacatgtctcatcatgaactgaccattgaaaatgccctcagccactacaaggtaagcctgggtcaccgcagccaggccctgcctccacctcgctgaggtgctgcatcctacatgttcatcatgcctggcacctcagagtagctcaacaatggacatctctctttgtttcttctgcttcatcctgttttggacccttgtcttgcttttctgtgtatattttgaggctgatgtttccatgcattaatgtgagtctgtctaaaagaggatattgtcagtgtgatgttagagtcccagtctgctcatctgtagaatagagtaattggactaactaatgcaaaaccctttcaggactaaaactgtgtgaactcctggttgatagtactagaaacttggctagaaatgtaatcaggttttatatacactagtaattatcctgcaaatatattaaaacctgaaagttactacataattttttctctctttttcttccttctgcatttgtcttatctttccttttcctttctttgctatggcaattattttatcttattctgttaaattttctatcacaaaagttacatgctgtaggtaataaattcagaaagcactgaaaggtataaagtcaagactaaaaacttgtcttcctttctccctccattcatagtcctcagaggtaaccattgtttgatttttgtacatccttccaaaaaatgtgtgtgcttatgaatgcactcttacacacacacacacacacacacacacaccctcaaaggattctctctatatttttttctgtaactcatttttgttatctaaaagtgtggcttgaacattttctcatcagcatgtatagatcttctgaattattttcaagaactgtgtggtattaaattctatgaatgtaccataaattggcagacattgggtcatttccaagctattgttttgttttaagattacacagaacgttctaatgaatatccttcaacatatatattggaggacctagaatatccaagatatattttggtgagagcataaggtagaaatctaactttagtttttccaagttataatcaatttgtcctatcaccatttgttgaatgattcatatagtttccccattgatttgaatgccaatgtcataatataccatatatgcatattttcttgcatactgccttgattctttgtgctgttctattctgtctatgcttgcctataagccaaggtattttagagattttatccttaccatatattttaatgtcaggtattttgatagaatcctcacaatactcttatttttcagaattcgtgcagatatttgtatatctttattttgccaattagctttggaattatttttatcaacctttcccctgaccctaatccagttagtatttgactggacaattgacaatattttcacatggcatccttctatccaatagtgaaggctgaacttccaaagctgaggtagctttgagatacttgacttttggagaacatgttatgatacagaatgagaaagtggggagtccagattaaaagtgactacagaaaggtagagaaataattgaaaaagccagaggcaaagttctatttggttctaacatcattccctccaggtgcaatgtccacaggagagtggggagggattcctcacctgccgatgaagcagcataagatggagaaatttatttcctcactaaatgattttttcaggtctgtcctttgtgttagatgtcatgctaggcattgtagaaagtacaaagatgattcataattcttgtttcaaatctgtctttaaataatgacaagaaagctaaaacaaataaataacgatgacacttgttcattaagtaaaaacttagtaagttcctgctgtgtgtgagaaactgcagcatgtgctaggaatcaatgaagacagatgccattccttctgccaggagtttgcagtgtagtaagggagacacaaataagtaatcaaagaactgtaacttttttttcttttttttttttttttttttgagatggagtctcattctgtcacccaagctggagagcagtggcatgatctcggctcactgcaacctccgtctcccaggttcaagcaattctttgcctcagcctcccgagtagctgggattacaggcacccaccaccaggcctagctaatttttgtatttttagtagaaacagggtttcaccatcttggccaggctggtcttgaactcctgacctcatgatccatctgcgctggcctcccaaaagaactgtaactttttattagttaggaagaaaataaacaagggtctgggatgaacagtaatgggtggcccatgtccatttggtcagtgagggcctcatagaggaagtgaccttgaagctgagggctggcagaagagaaatcaacctgcaaagacagggggtagggagtgcatacagatgcccacacctgagaagtcttgttatatttgaagaatttatcattagagtttgaatcgacaggacttactgagagattagaagtgggttctttgtaagaaaaaaacaaccccatcaaaaagtgggcaaaggatatgaacagacgcttctcaaaagaagacatttatgcaaccaacagacatatgaaaaaatgctcatcatcactggtctttagagaaatgcaaatcaaaaccacaatgagataccatctctgccagttagaatggcaatcattaaaaagtcagtaaacaacagattctggagacgaagtggagaaataggaacgcttttacactgttggtgggagtgtaaattagttcaaccattgtggaagacagtgtggtgattcctcaaggatctaaaaccagaaataccatttgacccagcaatcccattactgggtatatacccaaaggattataaatcattctactataaagacacatgcacacgtatgtttattgtggcatggttcacaatagcaaagacttggaaccaacccaaatgcccatcaacgatagactggataaagaaaatatggcacatatacaccatggaatactatgcagccataaaaacagatgagttcacgtcctttacagggacgtggatgaagatggaaaccatcattctcagcaaactaacacaagatcagaaaaccaaacaccacatgttctcactcgtaagtgagagttgaacaatgagaacacgtggacacagggaggggaatatcacacaccagggcctgtgaggggatggggggtaggggagggatagcattaggagaaatacctaacgtggatgacggtttgatgggtgcagcaaaccaccatggcacgtgtatacctatgtaacaaacctgcatgttctgtccatgtgccccagaacttaaagtatatatattttaaaaagtgggttgaaggaaggaggaaggtcaaagatgacttcatgagtttctggtttgagaaactgaatagatgatgtgaaagataataacttggtagaacaggtttgaatgcaacaccaagagtttcatttaagacaagttgagtccaagttgagacacatcaaaataggatcttacatacgcagctggatcacaaatttagatctccagagtcttattcctagaacctagaacaaagatccatccaggcaaagacaatatttaaatccaagaaaagcgggcacggtggctcacacctgtagtcccagcactttgggaggccaaagtgggaggatcgcttgagcccaggagttcaagaccagcttaggcaacacagtgagatactatctctagaacaacaacagcaacaacaaagtgaaattaacaggatttaaaaaaaagaacgtgacaatttggggctgggtgcagtggctcacgcctgtggtcccagctacttggaaggttgaggtgggaggattgcttgagcccaagagagtgaggctggagtgagctgtgattgtgccactgcactgcagccaggaagacagagcaagaccctgtctcaaacaaagaaacaaacaaccaagaaaccaaggaaactgatgtaattgcctcaaaagaggctagacagaaaaagaagttttggggtaaggttctgggaaaggccgtcatttagatgtaggcagaggaggacccagcaaaggagacaggatgagttgccagaaaggcaggagaaaaacaaggggaatggtgccccagctgctaagagagaagggtattttaagagattataatagattgcattgaacaatgctaacacttcagtaagatggtggcagaggcatgagagctgagttgggaggaggcacacttcttccatagtaataacagggaacaagagaaggtgtctgcaagcctacatagttttgcagttttggaaatccaggttttgttctggtttttattttctcataatatttgaggaaggaacatcagcagtatgggtgggatcaggatggatgtgaaaggtttgaaaagaaacaagatggtgtgatgcagtgtgggagagcgcttacaagagaaactatgtagggttggcagacagtatgtagcaccaatttgaggtctgaaatgtttaacatgtttcaggaggctgcctgaggacagacagcaaacaagaaggtgatggtacattttaccatggataaggagttgtctgaaaagtaacacagagagggagggtaagggagttgagtatatttctgaagaagtgattataatggtggaccttatgtgtactcatggatattgacagcgtaattttgaaattaaggagggtttttttttactgattttttcaccatatctctatttatttgaattaaactttgtagttaagtattgtaaattttgttcttttaaaagaatcatataatccctgactgtactctaaaaagaccgaaaaatttataaaatctacaaattcttatttgtatacctgtttcctcactgaccagtcaatgtcagtgtcaatcactttaatgtattttgctggtttagtaagtgtgtgacagtgatgtacgttgttttactttgcttgattatgaatgctagtagtggtgaggcttttatccatgaagactcgctgtctgcattttcccctagaatcagggcataaattctacatgattgcatcaaaatagtttatcttttggataatgagctccattagttgtgtttgtttaacctacatttttttattctgttatttcttcttaattatatttttgggcaactttttagaaatttgcatttaaattggctctattcttttttataatataatctccatgtcttaaatacacagaaatttgtttaatatgagtgtgctgctctgttttatttttaaaggtttattaattcctggcttacttggaatttcatatagtatgttgtgtgaaggatgactccacgttaatttttctttattctggtatccagttgttcccaaaatatttatataacagtgagtcctttccacatttacgtgttgtttctcgcttgacatcaattaagttctcatgatgggctgttttttttttactctagtccattgattattctttctgttatatagttttgacaacatgttactttatggtttatttttaaatctagcagcatttttgccatttaataattttattacctgatatttttgctgtcttttaagatgagtgcttttttacaatgtttctaaatttcatagatcattccataagattttaatggttattgcattaaatttgttgattactaagaatcatgacttttgggggtttagttagtcttctcaaccagtaccaagatacatcactaacggctttccactatgtatctgaatcagatattaaattgtctttacttaaacctcatgtgccctgactctattgagggtagctatgtattttacaacactattttttttgacaatttttacttgtagattcaaatgagattctttgctgagctcatgtatttaccatacatttttaaaaattttctgacattttctagatcataattgtgtgagtgatgttgtttttaattcatatttttggacacagttctgtaaggagcatgcattttgaaagctgttaatttttctttttttttttttttttcagtgtcagggataggtactttttgtctgttaaccacttttcttttgtacattgtgttagcaagttgtttaagaacaaatttaatgcccttttttgtcagattttaaaaatttaatatgatttaacctgaatgacagaattttaaaatattcatttagacaagacaggtcttcgactattttctagatttcaacttgtctttttttctctgaggaatattttggtaggtgaaagtgtatagaatttagcttttcaattctaatgagtgtcttatttatattatatgcacccattaaatacctttatgcaaaaattggtgaaaaagtactttttagaaacagaggactttaccttactcattttgaatattgtaaacaatatgacagtattatcttcagtcattctatgcctttatctttattactgttatctttgccttctttttttcatttacacagtgtctgtagttggctttattaaattttaaactgccagatgataggactgtggctttttgaactggaccttaataggcctgactttgacaggcagaaaaataaagcactcctgacagagagaagtaaaaggccatgaggaggtgtggctgcacgggtgtgtttgggaagcagagagcaatgttgtgtgctggtgaagagagttcagtgagcagagagagaatcccggacaatgtcagttggggctgggtcctggggcaccttggatgctgggtgaaggagtttgggcttatctttgttgctgagaagccattttgaagggaggactaacatcaacaaaggtgaaatgtgacagatttcaagctgaatggcaggcagaatggcagtcccaatgtcagaaacatgaaggtcaagaggagtggactgcagaagagcttggggaactgggcagcatgtttgattctaccatattgattttgagctgccaacagggcagtaggcagcacttagctctcacttggaagcatgagatggattgctaggaaaaaagatttggttttggaattctaagatctgaaggctccagaaaggaaagctaaggacatagtctgagatagaaaagggttgaggagccaacttcaaggctcctttttacagaaaaaaatgaagaggcaaagaagcagtggcagaaggcacaggtctaggaaggatggggtggagaggaggtacagaaaggcacctgcggatttcatggctggagatctcaggtgactttggagagagaggctttaaaggagtgatgagaaacaaggcggctggctgaggaatgacgacagtgaggaggtgaagacagcaacaccaaacaacttgactgtgagggcagcaagtgagtagatgcaagcggtgaaggctgtttgtgcttttcaggacatgaactcttgtgctcgcacaaacagttccacaccagcctgccaccttcttcagcgagactcatgagcgacatccatgatgcccatttattacttcccactcctatgacttttttatttcgtctctgctgggaaatgcctgcaggaaacacccagtgacgtgacacgtttttagtaactttgtgatgacatcactgtcttctctgcttactgcagctttctgttcaccaaatgcccttgctgacccctcacacacacagtcctttgaccttgatttcaccaggaaattctcaggctggaaagaactttcagttgtcttcaccatcccctgacttctacctgtacatctccaaaatctcctcaaaaaagattaaaaaaaaaaaaatctgaagtgggaaagatttagtgaaacacacacttttcagctaatagcacatcctgatctttagttcacaaatctcttctcgttttgttttctattttatcattcaccctccaactgccccccgaaccatgggcagccatttaaagcatttgttgttatttttgcttctcttataggtcatcaaaaacctgaaagcaaaatttttttagaaactcaaatcattctttaactccatagcttcaaggacacagcgacacatccagatgctgatttaagattgagagagaaggcactgcctacctgggctatgagtttgcacctagtaaagggctctatcttgtcactcatcccagtgaggaccaggcagcagaggtagcagagggttgccatttcctctttaaggcaattccctccagactggctccatgtgttactgtaaaatagtaagaagtgctagaagactgtcatataacttttgtatgttgagagaaagcaccctgaagtcaagtagaaatggttctgttgctatctattattttttctgtacttctaagactgtaaaaaaattacccattactatttccccccatcattatccaataaataaactctcaagtcccttactccaaccatgatgctctaaaagcatttctttttaggcagaattttacattagttgcattctgggatcaggccccctaccgtgttccattgactcctcccagtgggtgcccccctcactcccagtctgacaagcaggtgtgtctgtctctttaggaacgactcaatcgccggagcaggaagctcagaaaggacattgcagaacttcagcggctcaaggctcagcaggagaagaaactgcaggctctgcaggtgggtttttcgggttcctgggaaggactccctggagtgttctcaggagcccttacttaactattctggacatctgtctgtccctggaacagcctgatgtgggcagatggtcgtggaggctgaaaacccgggtgttggccttggcgtcaaagtttgctggttgagtgacctacgcaagttaagccctctgatctttatgtgacttacatgttaaatgagaaccagtcctgctctgcctggatcacagtagggatcaaaggagaccagtgtctcgtcaactgaaaattactacacaagccataggcctctgtttctttttattttattttattttttttttgagatggagccttgctctgtcgcccaggctggagtgcagtggcacgaactccgctcactgcaagctccgcctcccgggttcacgccattctcctgcctcagcctcccgagtactgggactacaggcacttgccaccacgcccagctaattttttctatattttagtagagatggggtttcaccatgttagccaggttggtctcgatctcctgacctcgtgatccgcccgccttggcctcccaaagtgctgggattacaggtgtgagccaccgtgcccggccgccataggcctccatttctgtctctgacagtctacctttctattcctcttggtcacatggcatctgtagatattcagagagtgaggtggaaaggtgaggtgtccctgcctttatgagaatcaaagctgcttctgctatacctgtgacacacagaggcaacaccatgagggcaagaggactgaggaatcagcattcctgctcagacattcagagactgtgaagggccaggagggagccacctgacactgagtcttagggagcccctttcctgtagtttcaggtagaccacgggaaccacaggctggaggctgggccggagagccagcaccaaaccagggaacagctgggtgccctccctcagcagtggctgggccagctggagcacatgccagcagaagcggccagaatccttgacatctccagggcagtaacacagctcagaagcctggtcattgatctggaaaggacggccaaggaattagacaccaacacactgaaggtgcataccctgaggccttccccaagggctgggattctccccgataggaggcagcccatctgcatcacccttctgggaggtgtaagagggaggggcctgtgtgatatgtggtgacttgtggtagatgtggcttgttccaggctacagagtgctgctgcagcagaatgggcacagaagaggggtgttgctatgttcccccagttctcaaggtggcaccccagagtggcctccaagagtgaattgggaaaggaatttggaggtgataggaacctgagaaccaattatgattctcactttttctctctcctagaatgctggtgacttactgaacaggtacgagctgtcccttcttctttcccacatgtgcatataaacccacacaacacagacatgcacagaggtcaaggagacccactgctccgttagcttttgtatcttgatgctacatggccaatggaagagccaatggaatatatgaatacatattaatctatgaaagatttctttgtttctaggagtgctccacagaaattagaggttatttatccccagttggagaaaggagtcagtgaattgcttcttcagccccctcagaagctctgacctgttcatccctgggacacctcacttcaggctcacctcagcctcctctctctccttcctccaacctgtccaggcccccactgggtctacccagtgcatcttcgggcctgccagctcctgaacatgtcaccatttcttcatgtccacagtcatcacctgatgcctgaccctctgactcttggacgatagccagcctccttccaggacaggctcatgcttggggctgccactgtggaggtcggggcccatggtctccaggagcatttgtgaaatctccattttgcctgtaaactgatggtagtgcccatctctcacaatctcattcaaataggatcctccaggcctctgaatggcccgagctcatcagcagtgacaccacctcacatgtggagcccagctgagttcctgcagtacttgttgtctgtaccactcacctggcacttatttattattgttgtggaagacagactcaaagacagcctcccttcgtgatcctcacctcttggaattcatgcccttgtttggtcccctccccttgagtgtaagtgggatctgtgacttgcttctaatgaatggaataaggcaaaggtgatagggtgtcactctggcaactgtgttgcattgtatagaactcctccttgctggcccacccttttagagcccctcctaggagccaagagcagcttccagccaacaacaagcagaggccctcagtcttgtggctgcaagaacctgaattctgccaacaacccgagtgagcttggaagcagattcttccccaactgagccggataagaacctagtccagccaacaccttgattatagtcttgtgagtacctaagctgaggacccagtgaagctgtgccaaaatttcccacccacagaaacagtgtgacaataaatgtgtgtgtgtttttttgttttctgttttcgtttttgagatggagtctcactctgttgcccaggctggagtgcggtggtgtgatgtcggctcactgtaacctctgtctcctaggttcaagcaattctcctgcctcagcctccctaatagctagggattataggcgcccgccaccacacccggctaattttttgtgtttttagtagagacagggtttaaccatgttggccaggctggccttgaacttctgacctcaggtgatcagcccaccttggcctcccaaaatgctgggattacaggtgtgagccaccgcgcctggccatgtgttgttataaggcagtaaatttgtggtaatttttgtggagtaatggataatgaatacaattgtatattagtcatttttgtataagcctcacttctttgggtgagcagggatcatattctgtctgtgtcctcatgtctagaacagtgtctggctcatagctggtgtccagtaaaattttaaatgtatgtataagtgaactaataagaaagcataaggaagggctcttctcaatcctctgattaaaaagagccatcaattaccttataatcagtatttattgagcctttgccaaagtagtcaataccatactgagaggtataaggaataaaacatggccacaattataaaacaagccacgtggtggtgcaaagagtgaaaactacagggtcagacttgagtttaggtctcggtcctgacacctaatgcctctgtaaccttgggcaaattacttagcctctctgaacctctgtactcccccctctaaaataagggttatggtacctgtggcctgggattgttgtcaaaattaaatacatgctgagtgtctgctaaagtgtctaaaacgtaaacattcaaatatgttcattttatcttttttttttttttggtgtattctggctttattgttattttttttaaattatactttaagttctagggtacatgtgcacaatgtgcaggtttgttacatatgtatacatgtgccatgttggtgtgctgcacccattaacttgtcatttacattgggtatttctcctaatgctatccctcccccctccccccaccccaaaacaggccctggtgtgtgatgttccccaccctgtgtccaagtgatctcattgttcaattcccaccaatgagtgagaacatgcggtgtttggttttctgtccttgcgatagtttgctgagaatgatggtttccagcttcaaccatgtccctaaaaaggacatgaactcatcctttttcatttcatctttttttaaaaaaaccacttccccttttgaaatgaaatatggaatgataaaaaaattttaaataaattccacttcaccatccagaagtttataatttagctgtggaactatgactaaacagctacagaataagaagagagcgtgtaactgcactgaattaggtatcacagaggctaagtgccctgggaattcagaggaaagaaacagcgagcctgggaaagtcagggtaggttttgtgggggaggtggggattggacaagtgggagaggaaggtgagaacattctaggtcacaataaccacatgaatgaaagcatagaggtaggaaaaagccacggtacctttgtaggagtgtgaggaaaccaacctggttaggctggaatgttcaggaatggggaagacgagaagtcaacaggctaaatggatgacaccaagacatagtgaggtttctgagtcaggaatgaagggagaagtggtgtttaatgaaagccagtctggatcgtttgcacaagaaggactgggacagagagttgggggctggaaggagaggggaggagaaagagcctagtgcagatgttcagaaaaaaggtatagttatttggcaagaagctgcagatctcagagaaacataagatcccaaatctaagagcaagacattagccaaggaaagaacacccctgaaagtgacagctagcaatttctgcatcccagatggagttaatgtcaccaagagaacttgtactaggagtaggaggagactgacagcccccagggtctctcctcaggagagaattcagttatactgaagatgccttccaggccccccttggtcccttctgacgtcaccacagatgatcaggccaggggtgggagtctgaacagcagataattggccaaacaagtctatgaggtcacctgtcaaggaagaccttatcaaagagggacaatagtaattaactgaaaccatcaggtcctctcggagattcagaagggatccatgatgaatgtgtcattagttggcaagaagagcagacacagagagaatcagagatgcatgtgcagccacgatgtattggaacaggtgtccatgacccatgctgctgagaggccgcaggaatatccagtcttcacgcttctttggacttcgagcccacttcttaccggtaggtcctgggcatacaacataccactgcataatggtcatgagcacagactcgggagccaaaccacaagacttcaaatgctggctctgcgacttactatcagctgatttgagaccagctgctcggcctccacatgtctcagttctcttatgtacaagatgggcacctacctcctgaggttgttgtgaggattaaatgagttaatatatacaaatatttattatggtgtttggccaaaataagttctatgtgtgtgattgttatcagcatttttggaatctctagttcttcctacaggaacgagtggtgaccccaccaactcgctcacgcctgacatagcttctcacggggcctggctcatggtggaaaatcgcattttccttatttctgcttttataataaacttacctatcatttgaactaacttgagtgggtctcagttctttgcaatagaaagggttgctaccatgtaagctttgaaaaatgaggtgtaaactgtggatgttacaaatgtgcaacagtccttcagagtcggaaagggtagctgggactctggggcctctagacttgagcacttcctggggagggaacccagagtcccacttccggccagcagagcaaggaggttcattaagctgccttatcttgaagttaccaggttttaggatctatccacttcccctgtgctgactccatactccgaaagcaagtaaacttcaagtaaaattaccctaggggagaagcaggtactgacagaccaacatgagtgttttcacttatgagcagttttatttctcagtgtaagacatataaattgttctcactgacatataactattaaaagaaaaataaaataaaacaatttaaaaagaagaaatataaattgtatttctgaatccaagtcacctgtgggggtgtagccagcattaaaataatcgccaggacccatgcaggcatctatctctgaatgaggcagtgcagcatagcagttaagagctcttgggtcagacatggatgaactggttgcatgatcttggctcgttaccaagataaagtgacacaaggtgtgtaaagctcccgagctgcaagccaggatcttcatacacatacattttagaggataatagtcctttcaaaagacacagctaaagccaataaaaataaacaaaaataggatctacttttctggaatcacaggtttgggtgctttggatatgttttatcattatataggcacttgtgtgtgtctgtatttttttgaatatacaacattttaatgagatactgcacactcccagggaaagcaattcaatctctaatccctggcttctgatctccacctcttttctacctgctgaggtaaggatgaacaacagaacttctcaattgaattctaagcttgggcctaagcacgctgtgccctctgcctttgagtttgcaccctggatggctcccctcctcccaggagacccagtagggagatgacagagcattgtagtttacactgagcagagtaaacagatgatgttaaggagactgtcagtgaagggcatgattatgcaaaataaaatacaatagtgacaagaacaagaaaataaaacatggtcactcttccatcccatttctcagatgtcactacagtagtctcaattacggtagtctcaattctttagactaaagttcataggtcatccaacttatgccctggcctccttctggaattcttttacctagcagtttctgagcccacagctgagctatttgtgacccatttgctcccactatctcatttcttgacctcagatggtaatcaactgatcaggaagacaatttccctagggttgagtgtggtccctgggttatgatttatggctataccttatgtcctcctgcccccaggccctgcaccttaatctcacccagaagtggcaacaccaggaggaaggaggcagtgagtggcgtcggctggggatggcacacatctgcccataatgacaatggagacaacccagtgctccagagtcacaggtcatccagccagttctctgctgtttcctcttcttaagatgcttcttcccctcttttccctattgaccataggcatcctttagaccacccttttcagaaagccatcccccactcaccctctccttccaggctgggctatgccccttcccctgaactcccataatgctggggttggacttcccgtaacacccaccacactgtgctgtaatttcctctttatgtttctctgtcttcccaagagctctttcagatatagagcaggttttttttttctctatattttcaagtcaccagtggccaccacactgcttggttcatagttaacacaaactaaatggttctagagaatgtgattacatgaactctaacattattggaagaaaacaagatgaaaagaggtgagatgccttgtttaaagtcatacaactggttgacaggctggttcaagaacccaggtcttctgacttcaaatccagtgccctttctatgcagctacttctgtgccaagcacggatggtggtgagcagaactggcagcagcctgagtccccaggtaccctggccatccactgggcattggggaaaggacttgatcagtagattgagagtcctctcttctatcccttaccacccggccccatcccatcttctaaagcagtcatttctattccaagtcatccaggtgattcagccagggatcaagtccacatggtacttgggttgatatgagtcctgtacttagaggagagtaggtaactgctccttctcaggagctcagggagaaactggaccctcggccccagagcccaaagaagggaatgaccttcctagtgaaggaggcagtgaaggtgtagatgggctctcgggtgacagcgttggtgaaggtcacccagcccacctcatagtcaagagacaccctcacctgccggggctgctccttcagggtcagccgtgtggggaaggagcccagagccgagacgaagccccaagccagcctcacagcccacaccccctcctctggccgcagccgaagctcccccttccgctgcacatcctcgctcaccacgcccacggtgcagctgcccccatgggccaggtctatactcaccacccacgtgtgtctcccccctgtgatgccagtgtgggccagaacacaggtggcccggtcaaaacgctgggggttgtctggtgagttctgccatttgtaggagaactgagctcgctggtggtcctcggacaagaggagcttggggtgggaagtctgagggtctagagaaatgtgagctgtggggataaccaaaagggacagatgtcagcagacatgctattacctccaaggaaggcatagaaactccccctgggcccctcctgttagtgttattattaccaaaaacatgtatagtgcctacgtgggccaacagtgtggaaccacctgggaacttgttagatatacgctctcagaatctgcatcctaacaagatgcccaggtgatttgcacacaggtaaagcctgaaaagcctgcctcagaggatgtgaaagctctcgtttagttcagtgtggtcctcgggaaagctcttctgctcaccgcaagttggttggtttccaaagctgtgcgtgccagcttggatctcctggggctgatacaccacattctcccctcctcccatctctatcccagagtgcagcgacatttctcccttcagtccaaacttcatgattcctccctgttttcctcccagggcactggtgactcatttacagtcttccctcctggcaggctctctggctcacccctgggttattcactctgcctcagtaattctgaaactgtcagagtctgaggaccactttttaccaccaaaaactgctgcagagccttgcgttttgttacttttagtattcataaattgagaagcttccataaatttaggtccatctgtgggttagagaaccccctccaacaactccgtgactcccagggtcttaggctggttgattgagaaatgacagccttgaaggggtccattctgttcatttttttcccacccacaggccgccctccttctgtcatctgtgaaatgacatctgagaggaagcaggggttccttacgttctaaagaggtgattataaacccagatcaaagtcccctttatccagaaagcattcccagatggactttatcccattctgcattaatctttctatctactcgacatgcgcagatcaggatgtgagcttcataccacgaatgtagtatgtgtatgtgcttgtcctttcttcatgtttctcctgagagccttacaaacaatgtgacacacacacacacacaacctatatatacacacatgtattatatacacacacatatgtgtatatataatatatatgatgtgtatatgtatccatgggtgtttgttatgactattgtcatagtcataacatagtcatagtgcaaatcctgcaaaattttctctcctttccgaggacttctcattctctcccatcctgacataggctccttacctggctcatagtccaactcaaagcatagtttttctgtaaagaaaataaaccaggatgagattttattagtcttacaaaaccatcagacacttaatgatgagaaaactgaggccaagaagagggaagggacaagaagaagaatgtaagctggaatcctctagaccagtggttccaagcttgcatcagaatcatctggagctcttgttaaaacacatctgtttcagattcaggtgctctggggtggagctgaacatctgtatttctaacaatttcctgggcaatgcagctgctgctgctggtgggagccccactgccctagccctgatcaaacagggaccatgactgccttgctcacctctgtacccgcagagcccaggacatagtaaatgctcaagaaatatctgcttagtgaatagagaaatgggttcatttatttattattccacttggaaataattttggggagagtcaaaggtcagcctttgattagagtgaaatttccttcactgacaggtcactggaagtatttgcaggaaatggaattatgggaaaagtccttctagggtgacataactgtgggtgggtcatttcaaaattggtgtcatcattcattctgtcatggttagtgaggaggtggttggcagagagccatgtcccattcctgactctcatccaaaccctcccccacaccctaccaccactccctgttccggaaaaggaagtggagcacagtccccgtaggaccgtctaactctgagccagactaacagaaagaaagtgagaaggaaggagggacgagccagataccacagggtcaagataaatactgttgttggctattaattaacaatgttcatcatcaaaaacttatcacatattacaaatgttgctgtgggattttttaacttattaagaatgatatattgttaatcattatctttcatattgcttaatgaccactaatcagatttgttgaattattttaaaatcagtttaactttttcaccagaaatattcacctttattctctttcttcattgtcacaatatcctaataggcagattttataaaaatctgcaaataaggaaatcaaggcacaggaaggaataaggcttgccaaagtcacacctttcagcagtggagcgtggaggccactcctaaacccaggcttcatggccacctgcgctctgtggaggcctggggttctcttacccagaaacatcttcatctccctctgcagcgggagggcctgctggggaaagtcccgaatcctctggcccagctctggcgacacagccaccggtttccggcactttctggtttcacatctaggggcacagaaatggctgggtctgggaattatcatccttaataatgtctccagactcagctggtcatcttctaatagggcatgatggcgctagttcctgcaggcagacgtacttcctctaggatgaatcccactgcccatttttgggcatctatggatatacctgagaaggcatttgggtatatagaggtttatatgtaaatttgtatccttaagtgagaatgttatatacctgtgtggcaataactaggcatgcagtacatgtatgtatatttatatggaaaaagaaaagagagaaactatattgcttaccttattagagtgcttctgatgtcctaggagaaagagataccagaaattcagtttccagcttctcctttccatttttctttcctttctttttctacttttattttatttattttttatttgcttgtttgtttgtttgagaaagggtctcactctggtgcccaggctggaatacagtggcgtgatcatggctcactgcatactcaacctcctgggctcaagggatcctcctacctcagcatcttgagtagctgggactacaggtgtttgtcaccatgcctggctaattttctttttttttttttttttttttgtagagatggggttttgttatgttgcccaggctcctcccacttttcttatgactggaaaagacaaaatatatttctagccctggataggaaaaggataccagatgcatagagtcacagagcattaggactcacccatctctgtggatcagagcccaaagcctttattttttagataaagatggtgaagtgaccttcccctgctcactggaggcaaagtaagtctcataccaaggtctcctgtttctcagtcctaagagcatcattctaagtcatgctgcctttccaatactttgtggggaccccaatacctctcctccagtgtgaggaagtgaaatagaccaggacaaacttcctgactggtggttggtgacatttaggttatagagaatggtttgcaacttacttaatactttttcaaagtgctactttcacttccatcttactgttggatcctcacaaaagccctgtgaaatatttaaggaaagtatcttccctatttggcagatggtgggacggagaggtggagaccagagagcaaaaagtgaccagggaactcttggaaaagcatgaactagaattgagactttctggtcctctgacccacctcccatctgggatacagagatgtgtgagtcagggagacatggcttaggcaagacaaagatgcaagagtcacaggacagcacaggtggggcagggttccggttcaggcctcaccgtcaggagctcccttgctggcctctcattcttctcctccagttcttcaataagagcactaaaccggcagatctccccagcaaccagcaaatcaaattcatcccgttgcctcaagatgtccccatcctggctctccaattgtgctaagaggatgctctgctgttcctctagaaacttcctcaggtgtgcgaactcagaaatcacctgttgtctcttggtggacacctgagtctgagggggcaggaggcaagcccaagagaaagtttgcttcctccttctccctctgctcctcttcctcccctgtccccaggtagatctggaactgtgtcatggtttccttttcacttgtcatcccatttcgagaagcaagactcacagtgttgtctcagcaccatctgctgcagcttctaaaaggggtagggcttacaggaggtgtaggaggaggtggtggggacaccctacctcctgtcttgtatgaaaagcacattatgtgcacagccctgagctactttacagtcacaatctcatttaatgcttacagtaattcaatgaggtcatgatgatttttactctccattttacagataagtaaactgaagttggagagttgcttgaggtcatagagttagtgtcagagtcaggatttaaactcataataacttcaaagccctataatctatgttgcctcagtttcaggaagacactggaccctgaggaaggggaggaacctggggaaggggtgatgacttaccaggaggacttgcatccttttattttctcttgactggatttcttgaatctcctctctctcttttcttagacatttaagacacttatggatttgttcctggggagaaggaacataaaatactcaagatggaaaatgatttgttcaggtttgtctggtcatctgaccctctgcctccaggaatgaaatggccccaggagaggagtcccttccttagctgacaatccccgagccttcaccaccctgacagcttactccctttgggtcttcttcctcttgatttgtctctaagactttggatcaggactttccccctttatcctgtgccattagaggctgtgacttggttttcccacttgagtctttcttcaggtttaacattctattgtgttttgcttcgggtaagtggtatctggggtctgtactgagtttgatatgccccgcactgaaatcattctgagtttccgactcatcccaaaggaacatgtgtaaataacaaccctcccttgttactgaaatcaattatctgtgtatgactccagaggggagaagaaacttgggtaatgtaaaaataattgataaattgttttcaaaattatttgctccagaatagagttaggaacaggtacacacacgataaatatgtgtgttcaaagatatattagaattctcactatcaactgctaattaactaattaagacatccacacacagacttgtactaaaacataattcataagcacaatgcataaacaactaaaaccagcacacattcatttaatgacagataaaatggcatgccacatacatttacccagcctgaatatatgtaaacacgaatttattcacaaacaggagctctcagttacacttacacactcgaatatatacatactcagactcccatccaaacacaccagacacacttctaaacatgcaaacattaacacatatacacactgtttgtacaatcattccctcaaatgcaaacttcagacacacctgatccatggcacagacacacacactcatgtttggtcactcattcattcaacaagtacttgttgaactcccgttatctgttggccacaagtgaacacagaacacactcaaaaaaacataaaacataaacacaattttccatgcctgggtctattgcctgggtgatcatgtaagtaaggagaaagaatttggcctccgggtggcctaaataatccacaactctgctgtttctcttagtccagtccagtccaccctgggatcccccagttcccctttcctaccctatagggagccgctgcatcctccaggaagcgcatggtgtgggtagcgtgctccccagcctcccggcacaccacgcacaactgcatctcatcatcctcacagaagaagtagatcttctctccgtgctcttggcagacatcctcctctcccaaacccagtgtggacaccagctggaggcgctcaatgttctccaccacgttagccagctgccagttgggccggaagctcccaggacggaagggttctttgcagagtgggcaagtaggggactcctccaggtctgggcctggtatctcacagtagcgggtaaggcaggcccggcagaagttgtggccgcagtcgatagtgaccggctccctcagggtaccctgacagatggggcagttgacttcatctgccaggctggtcacagaggcagcagaggccatgctggtcctgctgctatggcttcctcaaggccactctctctgcttggccacgggggaagggctgggtcacacactcacacacccacacatgcacatggctggacacaggcacatactaaatatgcaccagcacccatatcgtcacacacttgcatctctggcagccagggttctattctcctgccaacagcagagatgggaaatagcagaggagaggaaggaagaggggctcacagcatttcagaggtgaccttagatgaccataaccaggggctggccattcctttctgcccatccagagacactcacagtataaggaaagtggtgatatgtcagctgtccactgtcagaagaaatattcttttgggggcaagtgggagactgggtcacagagtggagatgccattccagcctttctgccatatggccagctgtctccaaagagattggaggtatcagccagcccagggcttgcccatcagcaagcaggagagtgtgggggctcagataaggtccttgtgccagggtgtacactgcaccagcaacttcaatggtgatgcctcaactggcctgctgcaggcctcaaaagaggctggaatattccctatgatggggaggagaaagaaaactactaacggccagaatttatttacaatgacggtacaacttacattgatacaagcaatttggccagaatttatttacaatgacggtacaacttacattgatacaagcaatttaaaagtatgatcttatttctgtgtctgctctgcaacatcagtgctattaggatctccatttcataaatgagaaagctgaggcccagccaggttattcagcttgccctaggcacacaagtaagaaggtgagtgaccataaataatttgctgtcagatctgtcttccgagcaatgctattcaacataaacgcaaagtgagccacatatgcaatttaaaatttcctagtggccatataaaaatagtctaaacaggtgaaagtaattttaatgatgttattttatttagtcctatatttccaaaatattatcatttcaatatgtgatccatataaaaagtcattaataagatattttacatttttaaatttgtgaaaagcctttgaaatccggtgtgttggccgggcgcggtggctcacgcctgtaatcccagcactttgggaggcctaggcgggcggatcacgaggtcaggaaatctagaccatcctggttaacacggtgaaaccccgtctctactaaaaatacaaaaaaattagcctggcgtgctggccggcgcctgtagtcccagctactcgggaggctgaggcaggagaatggtgtgaacccgggaggaggagcttgcagtgagccaagatcgcgctactgcactccatcccgggagatagagcgagactccatttcaaaaaaaaaaaaaaagaaaagaaaaaagagaaaaagaaaaagaaaaaaaagaaatccggtatgtattttacatatacagcatgccgccattcagaccggccacatttcagtgctcagtagacacatgtggctggtggctcctgtattggacaaactagttcctgggctgcactcgtggcaggaagagcagagattggatgggaaggggaggtaataaagtgattagagtaaaaagggagcaaccacaaggggctaggctgatcacccagtgggagaatgggggaaggcctggttttatccacagatgtgtgcatgggtgaaggaccgtggctgcagatcttggtcttggcatgaggtgtgggaggagcgtagggctttaagccaggagactgggatcgtccttaacgtgatactttctagctttgtgacctttggaaagtcactttacatttggaaagtcagtttacatttctttctctgtaaaatgaaggtaataatgtttgcctagagggttattaaaattgaatgtagtaatataaaaatactaaaccctagataaatgtggttgaaactgattatctgactaatcgttttctaatgtgtatcaacataaatcatttgcattatggtttcttgccttctccccgctacagtaaaaataaataaataaataaataaataaataaataaataaaatagtccagtgttacccgaaccccaaaggggactgttgtgccaggtggtgggggatttgggaccgtaggaggggccaccatgggcagatgtggtgagggaggaaaggagagcagaagaggggacccgatgagcaatccttacaccctacctgcagtgtcgaaacagcgtcccgcccacacacttccggcagaatctcccgaagtccacacctctcactccagcctggactttgatgctgtgggcacgcctcagagccagaagtttatggctcccacctgctcaatctgacaggaagcttctgctccccagttctccccagccactgtggtctacagattccaggaaacccatccccctgtgacctcatggtgtgctctgttctccaccctagggaccagaaggagccaggagtaaagaactggcttacttggccgccactgggaaattctgggtaattcgagacgccctggaatttggacccactccgctgataggtggtggccagggttctagggaacacaagaggcggagccaggtggcttccctgtgctggcattcttgcctctctctctctttctctctctctgtctctcagccttgcagccgtttccctctgcgattcatgtaagtgtgactcgatttcagggaaagggaactcgcgtgggctgaggagaccggagtggacgggctggggaaggcaccgtgatgcccgcaaccccgtccctgaaggtggtccatgagctgcctgcctgtaccctctgtgcggggccgctggaggatgcggtgaccattccctgtggacacaccttctgccggctctgcctccccgcgctctcccagatgggggcccaatcctcgggcaagatcctgctctgcccgctctgccaagaggaggagcaggcagagactcccatggcccctgtgcccctgggcccgctgggagaaacttactgcgaggagcacggcgagaagatctacttcttctgcgagaacgatgccgagttcctctgtgtgttctgcagggagggtcccacgcaccaggcgcacaccgtggggttcctggacgaggccattcagccctaccgggtaagaagtgtagctttacctagggcctgtttggggcaggatgatgtcctgttatgaggggaggaaatcgggcggggatctggatgaaaggcttccacatcagggaaccctaaggttacagggactttcgaggcattcccagactgaaggcagatagggctccacttggatgtgtggtagttcctggtctggggggaacttcagctccagctctcagaggaccccacagaggtggagtgcaaagaactgtagccttggcttcactcactatggaaagaaagctccaatgccgagtgggatcttctgcagattatgggcagggtaaacttgttctcccaggatccagactggaaatggggtttatagggccctgactgccagggcgcagaggggagggaggagctgggaaggggaacctgctagcactgctcttcttcttgagaaagggagggtggcagtagtccagaattgtgagaattccccatctggccttggggcactttcctgtcagcctctcagatctctctcttgtcatccagtcaccaggtctggaagtggttaccttagaaacatctcccaaatctttaattctgccttatcctcacagccaggttctccctatctcttgcgcagactttgcagtctccatggcatttcctgtctccattctcaccctttccagtcaccttccaatctgctgggagacagatcctcctaaaacacaaagtcactcatctgcacaaaatcctcccatgtatacctagtgcccaaagaaagtccaaggtctttagcaagacattcaaggccctttgcagtcgggatccttcctccctgtccggcctcatcgctcagcctccctcctcaaggcaccacgtgtctggccagactgagctgcacttgctgttttttcctgagttgtcttattcattcctgcttccaatactttttgcacatagtctcttcctcctagaatactcttctcccttcctcccacctctctctctgtttttaagtatacaattcaggggcactaagtccttttctttttttttttattatacatgttctgggatacatatgcagaacgtgcaggtttgttacataggtatatacgtgccatggtggtttgctgcacccatcaatccatcatctacattaggtatttctcctaatgctatccctcccctagtcccccaagccctgacaggccccgatgtgtgatgttcccctccctgtgtccatgtgttctcattgttcacctcccacttatgagtaagaacatgtggtgtttggttttctgttcctgtgttagtttgctgagaatgatggtttccagcttcatccatatccctgcaaaggacatgaacacatcttttttatgcctgcatagtattccatggcatatatgtgccatattttctttatccagtctatcattgatggacatttgggttggttccaagtctttgctattgtgaacagtgctgcaataaacatatgtgtgcatgtgtctttacagtaggataatttataatcctctgggtatatacccagtaatgggattgccaggtcaaatggtatttctcattctagattcttgaggagttgccacactgtcttccacaacggttgaactaatttacactcccaccaacattgtaaaagcattcttatttctccacatcatctccagcatctgttatttcctgactttttaatgatcaccattctaactggtgtgagatggtatctcattgtggttttgatttgcatttctctaatgaccagtgatgatgagcttcttttcataggtttgttggccacataaatgtcttcttttgagaagtgtctgttcatatccttcacctactttttgatggggctgtttgtttttttcttgtaaatttgtttaagttctttgtagattttggatattagccctttgtcagatggatagattgcaaaatgtttctcccattctgtaggttgcctgttcactctgatgatagtttcttttgctgtgcagaagctctttcatttaattagataccatttgtcaatttaggcttttgttgccattgcttttggtgttctagtcatgaagtctttgcccatgcctatgtcctgaatggtattgcctaggttttcttctagggtttttatggttttaggtcttacgtttaagtctttaatccatcttgagttaatttttatttcaggtgtaaggaaggggtccagtttcagttttctgcatatggctagccagttttcccaacaccatttattaaatagggaatcctttccccattgcttgtttttgtcaggtttgtcaaagatcagatggttgtagatgtgtggtgttatttctgaggcccttcttctgttccatttgtctatatgtctgttttgataccagacatatttgatatcatatactacagccttgtagtatagtttgaagtcaggtagcatgatgcctccagcttcgttctttttgcttaagattgtattggctatgtgggctctttattggttccatatgaaatataaagtagttttttctaattctgtgaagaaagtcaatggtagcttgatagggataacactgaatctataaattactttgggcagtatggccattttcacaatattgattcttcctatccatgagcatggaatgtttttccatttgtctgtgttctctctgatttccttgagcagtggtttgtagttctccttgaagaggtccttcacatctgtgggcactaagtccttttctctccctctctattcaactggaaatttatctttcaaggcacattgtaaatgttttctgctttccaaaccttcccttaggcctacaggcagagctgacctctgtgttcccatctcactgtgtgtacccctggactattgcatttatctatctgtattttaatcacttgacattgacttcttcctgagatggtggtctctttagggcaaggactgggccttttccacctttgaacccctcagcactcaacagtgtgcccaggatgtgatagttaataattgtgagttgaattattaattcagtcacctctatccacccattcttctccccacaggatcgtctcaggagtcgactggaagctctgagcacggagagagatgagattgaggatgtaaagtgtcaagaagaccagaagcttcaagtgctgctggtacaggccacgtcactggctaccttttcctttgaaggttttcttaagagactctggggaaacccgttggctggtatctgtttcctggctgaaaagaactgacaaactgttctcgttcaccttcctgtggctgcacaaaggcatttgggatctcagaccatgagcactagaagtggttctgatgtcttgcaatccaagatccatcttgtatatcacattttacagagcagaaaacttaggaccagaaaagcaatgctcccaaggccacatagcaaagctgaagttcatgaggaacctggatttcttgacccttaattcattgttctttccatcctagtctgtttgcctgaacacaccaccttcagatgggaagcttggggtcaaaaacatatgttagtgtcgggattctagtcctgactacaggctgaccttgaggagagtaggctgatggtgtggctacatctggatccctcacgcctctcttttcatgctataaagttatggaggaatcacagtgtgaggatttctggtaccttgaccaaggagagagtgtggggacaaagcaacctatccaccatccctcagctctcatcaacgtatgccctgtagttggtgatttccacggctaaaaccaaaattacacactctcccactaagttgtgttgactccaatcacaacttccttttgcctctaagaaattattacagtcttccccacctaactctaagaaggcatagtagggttatgatggtattgtagttgtggaaatatttttgaaaagttcaacatcattctgagagcataatgtagcattattattagagtatctagctaagacagtagcacagccctcatcattggtaagttcatcctgagacctaactacttctaggcatattagtaaatggaatgagtcttggaccagttgctccctatccctgttaatcaataataagtatatagatgatcatcctggaagctatctctgagccccttcctaaccatgtctgccttttatcccttgaagactcagatcgaaagcaagaagcatcaggtggaaacagcttttgagaggctgcagcaggagctggagcagcagcgatgtctcctgctggccaggctgagggagctggagcagcagatttggaaggagagggatgaatatatcacaaaggtctctgaggaagtcacccggcttggagcccaggtcaaggagctggaggagaagtgtcagcagccagcaagtgagcttctacaagtgagagacacttcaccactttgtaggataagagagggactccacggggaagggggtgggcaccatgctttgggctggagagaggcaggaaagggaagtggagagaggttaacggggtgcagatccagaggggctggagacttgcccaagtcatacactgtggtcatgttaaggggtttagggtcagacagtcttggatttgaatgttggctcttccaattgtgtgacttgagtgagtctcttagcctctctaaacatggggacagcaatagcacctccctcataaagttattgcaaaattataagaaacaatccataaaaaatgcttggcatgattcctgatatacagaaagaactcaataactggtgtctgctatggttatgaatatgtgatcctggctcacatcaggtccagctgataactgaaggcaggcccctgctctctaccacctcctaatcattgcagacacaacccacccccacgataaggctgaaacagggaaaccagcacaaatgaactgactacagaaacccaaattagtaagaaaacatgatgtaaaagaacaatctaatgagtaggtaattaaacaggacaactctctgcagaaggagagttttgagttcatattttaagggaaaagtgatgtacagaatccctgacaggaaggacttatggaaactaaatgtatgttcttgtctttcttttgcaggatgtcagagtcaaccagagcaggtagggcccactccccggtcctgcctccttttactcaacatcaagactgaatgggaaggggcaggggcacttactgccacccactttgccaggaaagcaaaggcactctggcagacacactgtctcattcaactgtgcacaaacagtccaaactcactaaagatttgcattctaaaggttcatttttaaattgattggttggtattggggacacattttttcccctagaagtgaagttataaataataatcatgtttttaggttgatccaggaacatttatttaatctatgaaattattagtacttgagtcagtatctaacaccatttaaaatgtaatttaaagggagaatactttctgtagactatgataagcatggaaaccaggaataccagcctgttctttcattcattcattttttacacacatctctggtttccttcagaattttctaatgctactgtaaaaggacagccaccaggagccagtggcattgtaaatgcatggccctttccttccctgtctgctataagcattagcagtctgcactgagatgaagagaggtgtagtgactagggaacaattgtcacgtgctttgtgcctattcccgtgcagggaggataaacccagggtccatgaatcaggaagtgtctccaaacatgcttttcaaagagcattagaggtttagatctagaagggcttggaggtcttccagtctgaggaagaaactgagacccagggggtgaagagtcttcaaggtaatgcagcaagtgtctaatgaggactgagctgggaccagaatcaggagtttttttcattgcaatatatattttcgttgatcctttttttttcttcccttctagcctcttttcctttacaaatagcagcatacacaagggtagtttaaggctgttttcaaatggtaccctgttgccctctagagaccaaaaggggtaatgatctctgtccctcagcccctacagaaccaaacattctcctaaaggggcttacctccaattcttgagaagtgattatccttagttcctcttaggtttaactgaaatgcctactattttagtaactacacatttccagcaaaagtaaagaaatgatactcaatttgattattcaccacagacgccaagatcattctttagtctgattttagcctcacgtggtctcacccgaacatttgtttttggaatttggacctaactggttaccaaacctgtctgcaggtgtgagatgaagacttttgtgagtcctgaggccatttctcctgaccttgtcaagaagatccgtgatttccacaggaaaatactcaccctcccagagatgatgaggatgttctcaggtaaaggggaaggcgccacagttttccccagtcccattagctgccctcctgtcttccacccatctccatccttctctgcccttgaaacctggctcgagacatcttccctccccagagccttcccttagtgatctcaatttattcaggggcactattcccagagcatctcctccactccctaaggacaggtgcaggactgagagtccaggagggtgaggacccttctcctccactagaccacagcagaagccgagtcttctgtcctcatcttcacattgtactcaagtcaccttgcccctgggggtgcctataagaagtaataagtcacagatctctctttctatttctgcttccctcagaaaacttggcgcatcatctggaaatagattcaggtaaacagcttgggatttggggagtcattcttccattcatccattcaatccatggcagcaaacagagcaataaaatgcatgaattctggagcttgattgcttgagttctcgattccagttcttgctagctctgagacactgggcaagttattaagcctctgtcccacaatattttcttcatcagtaaaatgaaaataaaagtactgtacctgtcccataagtagctgtgaggacaaaataaattaatacatgcaaagagcttagtatattacctgactcatagtaagtgctcaattaatgtcatctacttgtgtagatattactcgttgaaaaatacttatcaagccctagttttttgagagcattgtgctgggctctctactgatttgaacaaaaaatgtgcaattttttaaaaatcacatttatttttaaattggtgcttaatttagaagttgtttccataagcatcacctcactcactctggtataggtaagtgcttttcaaacttaatatgcagaaacgtctcctagggatcctgttaaaatgcagattctgatttagtagggtgggatggggcccaatattctgcatttctaacaaacacccaggtggtggggatgctgctggtccctcccgctgcactttgagaagcaaatccttaacagcaccacttgctgattaggtagaagggcggttcagagaagtggcccaatggcaggctgcccaagtccagtactccttctgcctcccacgtgcgttgcctgctctaggaacatctgtggttgccgcccgctgttgatgtctgcgcgctcctccctctaggggtcatcactctggaccctcagaccgccagccggagcctggttctctcggaagacaggaagtcagtgaggtacacccggcagaagaagagcctgccagacagccccctgcgcttcgacggcctcccggcggttctgggcttcccgggcttctcctccgggcgccaccgctggcaggttgacctgcagctgggcgacggcggcggctgcacggtgggggtggccggggagggggtgaggaggaagggagagatgggactcagcgccgaggacggcgtctgggccgtgatcatctcgcaccagcagtgctgggccagcacctccccgggcaccgacctgccgctgagcgagatcccgcgcggcgtgagagtcgccctggactacgaggcggggcaggtgaccctccacaacgcccagacccaggagcccatcttcaccttcactgcctctttctccggcaaagtcttccctttctttgccgtctggaaaaaaggttcctgccttacgctgaaaggctgaagtggggcgcgcgaagggcggcgaagcggagacggcggctctccgggatccagctccgcccctggccagtgtgcggcccgggggctccctgtgcccgcgtgaggcgagagaacaggggacttgagtctcgaacagcggttgtttttactttatttatcttaggccctcagctccctgacgtcctgagcctccctgtgacgctctggccttctctgcacctcagagtgcagaaccacagacggcttcggctgtgcctagggcaacagccaacctaggagccagcgggctttcggggaaaaaaaagaaaaagacatctaaaataaaatgtttaaactgtttcaaaataattatcttgggaaaaatcagggttttgctggacttgcactaatttgtacagttaacttcgtactttgacacacacctgaagatgcctccacctttgtagggcttagggcctttttatcagccctgggtggaccccagggccccttcctttcccttcccttctggtcatttctctggacttgtagagaatgtcctaagaaagtgtgactcacagacctctggattccatgtgtccaattagcgctgatgggactggagaaaggcttaaatccaatgggatctgcctgtgttggcaatttagggccgagatggctcgagggagtagatgcagagaggaagggtgatgatccctctgtgaccaagacacaatcctgtcccttcttttagtcaggatatccctgatgacagacagtgggacaatcaccaggccccattgtttaataaaacgaggcttttgctcaggtctaactaacctctcaaatatttgttattactgcagttattatttggacacagaaacagaccacaggttaaaataactttaaaaagcaaagtattaatccctatacaagtgatgtttccttccacccctaccctttctcctctcaagttgaacactcacattctcacccttccaccccaacctctgaaaaaaatctgccttcaactccaatccaggttccctgtagtgtaagacaataccctgtgtacaagaacactttagggtcggcacggtggcttgcgccagtaatcccaacactttgggaggctgaggcaggtagatcacttaaggtcaggagtttaagaccagcctggacagcatggtgaaaccctgtctctattaaaaatataaaaattagctgggcgagatggcaggcgcctgtaatcccagctgctcaggaggctgaggcaggagaatcacttaaaccagggaggcggaggttgcagtgagctaagatcaagccactgcattccagcccgagtgacggagtgagactccatctcaaaaaaacaaaaaacaaaaaacaggctaggcgcggtggctcacggtggtaggccgaggcaggtgggtcacctgaggtcaggagtttgagcctggccaacatggtgaaaccccatctccactaaatatacaaaaattagctgggtgtggtggcagaccagctacttgggaggctgaagcaggggaatcacttgaacccaggaggcagaggttgcagtgagctgagattgtaccactgcactccagcctgggtgacagagtgagactctgtctccaagaaacaaacaaacaaataaaacaaagaacatcttcattattgcgtaagccctgctcctaaagcatgggtcagatgttttaaaagcactcaaagagtttggaccatatgtgaattttatttaaaaattgtaacatgaatcaatgtgatgtgaataattaaccctaacttgactgttggggaaatagaggttcttgatataaaagaagccagacaatgtggggtttcttctgccccccagtgtggtgagcagagccatccttatctgacccaagtggcttggtagtccaacctagtagtagtagtagtggtagtagtagtagtattgcccaatgcttattataaaagttgtatatgctcatggttaagaaaattcaaacattttcaaagtgtataaataaaaacctctttccccacccactcaacacttccccttgccactccccatagttaaacattgatatcaattttttgtatatcctgcaagttttgaatacaaatatatattgctttctcttttttttttacataaattagattatgccataagtattctttgcaacccctccaaaagaaaaactatgtgcaacacatgctaattgtaccattggtcaaatttgttttaattatatcttcatttgaaccttacaacaagcctgtgaaatacataagacctattttgtttttctcatgtggtggttgagaaaactgacacacagttaaatgaacttgtctaacaattttcacagctggtccttgtgacctgctgaagtagaatctacctgtcctggagctcagtgcagtcacatttccaccacactcagacttctaaaacagacacatcccaatggggctatgtttcatttgctacccattgaattcatgttttagacagggcatttttggtttcatatgaaacagaaaaaaaaaaaaaagaaccgatgaaccataagcacactgtatttccaagtctctggtacttctaattttagagtggtccagataatttaaaagtgtggatatgcacatttggaggctttgtgcctatattaataaattgttctgcataagaaaggaaagagaaatttagaagccaaaagaaatttgggagtggctaagacctcagggtgaggactgagagctgcctgaaggaaaagcagaggaaaattattcatttggtggtccagctggagccacaggatggctgtgttcctgtgtttgtgatgtaaaactgtcctctatctcccctacaggatcctctgcacaacctgccttgcccctaatgctttttgtaggtgttcctgaattccaagtgctgagttctgtccactactgggcaggaggcaaagagatcccacaaaataattgctgggctgctggactatgtgaggagcagtcacactgatgtgcctcggagaaccagaggggttattgtaaggaccaaggtgggacctataagggaatctctctggagcccaggaaccgtgatgacagtgagctggttgtaatgggaactagagcctaggcagatgcattgtctctctggtcggcttactttgctctggatgtggggcccattctcctgtctataaggaagcttcctagctctactcatggcctttattttctttttcattttcagttctttccttctttcagacttccagtgtagagtgttgactcagtcatacctctcagttcttggaacactatcatcatcagtccatgcaaggtcttctggttttatttgtattttctcctctctccccaatttttattcccattctcctcactcccaaaggcagctactccctaatgtttttcttttttaaaaaatttttcaacttttaagttcaggggtacatgtgcaagatgtgcaggtttgttacataggtaaatgtgtgccatagtagtcagctacacagatcatcctatcacccaggaattaagcccagcacccattagctattcttcctgatcctctccctcctcccacccccgccctccaacagggcccagtgtgtgttgttccccccgcctcctgccatgtgtccatatgttctcattatttagatcctacttataagtgaaaacatgctgtatttggttttctgttcctactttagtttgctaaggataacaacctccagttccattcatgtccctgcaaaggacatgatctcattcctttttatggctgtaaaatattccatggtatatgtgtaccacattttctttatccagtctatcattgatgggcatttagtttgatttcatatctttgctattgtgaatactactgcaatgaacatacacatgcatgtatctttatagagaacgatttctattcctttgggtatatacccagtaaatgagattgctgggttgaatggtatttctgcctctaggtttttgaggaattgccacacagtcttccacaatggttgaactaatttacactcacaccaacagtgttaaaagcattcgtttttcttcacaaccttgccagcatctgttgctttttgactttttagtaatagccattttgactggtgcgagatagtatctcattgtagttttgatttgattttcacctataaccatctgatatttgacaaacctgacaaaaatgtctctagtagcaagtattactaatctattaattactaaactccctttaatccaagagtatttgttctttgtgctcaggatttctttggctatttgggctttttttgggaggggggggttggtccatatgaattttaggatttttttttcaaattctgtgaagaatgatgttgatattttgttagggattgcatttaatctgcagattactttgaacaatatggtcattttaatgatgttgatattccttctaatccatgagcataaggtgtttttccatttgtgttgttttgaatttctctcaacagtattttgtagttttccttgtaaagatcttttgcctccttggttaaattcaatcctaaattgtttttggtagcaaaaatttctaaatgagattgccttcttgatttctttgttggctaaatcattactgatgtaaagaaatgctactgacttttgcatattaattttgtagcctgaaactgtactgaactcatttatcatatctaagagttttttggtgaaatcacacattgtgtttctttcttttgcctgatccttatagctaggattttagtactatgttgaataagagtattgagagtagacatccttgccttgttccagtgcttagaggaaaagctttccacttttcctcattcagcatgttagctatgggtttgttacatacagctcatttgaatttgaggtttgttccgtctatgcctagtgtgttgtatgtttttatcttaaaagaatgttaaattttatcaaatgctttttctgcatctattaagatgatcatatggtttttgttctacattctattgataatatgtatcatgcttatttattcatattgaaacatctttgcatctctactataaatcccacttgattttgatgtagtatttttcgatgtgctgttgggtttggtttgctagtattttgttgaggatttttgtatctatctatgattttgtatctatgttcattagggatattgacctataattttctttttgttggtgttgtggtgtatctgtctggttttagtattagggtgatgctgacctcatataattagttagggaaaattccttcctctttgacttgtttgaacagtttcaggaggatcggtattagttctttgtatgtttagtagaattcagctgttaatccctccagtcctaggcttttcttctttgagagacttttaattactgattcaatcttgctattaattattggtctgctcaggttttctatttttttctgattcagtcttggtaggttgtgtgtttccaggaatttatccacttcctctagattttccaattttatctagttgtttataacagtctctgatgatctttaatatttctgtgatgtcagttgtaatgtctcctttttcaattctgattttgttcatatgggtcttctgtcttcttggttagtctagctagtagcttatcaattctgtatatcttttcaaagaaccaatttttcatctcattgatcctttgtatttctttaagtctctactttctgctctgatctttattatttcttttcttctgctaatttggggtttggtttgttcttgcttttctagctccttcaggtacattgttggattgttaatttgtaatctttctacttttttaatgtaagcatttattgctgtaaactttcctcttagcactgcctttgctgaatcccacaggttttatgtttccattttcatttgtttttagattttttttttaattttcatcttaatttctttttttttttttttttccagatggagttttgctcttgtctcccaggctggagttcaatggtgtaaactcggctaactgcaacctccacctcccgggttcaagcggttctcctgcctcagcctcccaagtagctgagattacaggcgcctgccaccacgcccagctaatttttttgtatttttcacagagacagggtttcaccatgctggccaggctggtctcgaacttctgacctcaggtgatccatccgcctcagccacccaaagtgctgggattacaggtgtgagccaccatgcctggccttctatcttaatttgttcattgacccaatggtcattcaggaccatgtggtttaatatctatgtatttgtatagtttccaaagttcctcttggtattgatttctcattttattctattgcagtctgagaaaatatttgatatgattttaatttttaaaaatttattgagacttgttttgtcgcctaatatatggtctatgttggagaaggttccatgttctgatgaaaagaatatatattctgcagttgttgaatagaatgttccgtaaatgttaggttcatttggtctaaagtccagtttaaatccaatgtttctctgttgattttctgtctagataatctgtctaatgctgagcatgaggtgctaaagtcccccactattattgtattccaatctgtctctctctttagagctagtaatatttgctttatgaatgtgggtgctctggtgtttggtgtatatatatttagaactgttgaatcttcttgctggattgatccctttatcattatataatgacatttttggcttttttttttcacaattcttgacttaaagtctgttgtatctgatataagtatagctactccttctcactttttgtctccatttgtatggaatatctttttccatccctttactttgtctatatttgtctttactggtaagaaactttactgagtttcttgaaacagcttacaggtgtattatctttttaaataaatccagccattctacatctttcaagtaaagaatttatgccatttacattcaagattattattgatatatgagactttgttcctgtcatattgttgttttctgattgttttatatattctttgttcctttcttcttgtttgtcattgtggtttggtggatttctttagaggcaccatttgagtcctttctcttcttcctttgtgtgattgctttactagcgagttttatacttttgtgtgtttttatgatggtaaatatcatcctatcacttccaggtttaggactcccttgagcatttctcgtaggactgatctagtggtaacaaattccctcagtatttgcctgtctgggaaagactttatttctttttcctttatactttaatttggctggatctaatattcttggctgacagttattttctttcatcattttgtatataccatcccattatcttttggcctgtagggtttctgcagagaaatccactgtttgttagtctgatgagttttccttttaggtgactaggcactattctgttgctatttttagaatttgctctttattttgactttagacagtctaattataatgtgctatggagaagaccctttgcattgcatctgcctgggaaacattgagcctcctatacctgcatgtccaaatcccttgctaggcttggaaagttttcatctattatttcattatatagattttctaatcctttcatttcttcatcatcctcggggatactaacaattcatatattcagttgctttatgctgtcccaaatatcatgaaggctttgctaatttttttatctaggcaaagtaaattgaattttttaaaattattttttctttatttttgtctgactaggttatttcaaaagagctgccttcaagctctgagactctttcttctccccaatctagttctattgttgaagctttcaaaggtattttgtatttcctttaataaattcttcatatccagattttctatttttcttttaaaaaacaatctattgctttattaaatttctcattcatatcctacattattatcttttttctttctattgtttttcagaattctcttatatatcactgagtttcttttttttttttttttttttttttttttttttttttttttgagatggagtctcactctgtcacccaggctgcagtgcagtggcacgatctcagctcactgcaagctccgcctcccgggttcacgccattctcctgcctcagcctcccgactagctgggactacaggcacccaccaccacacccagctaattttttctatttttagtagagacggggtttcaccgtgttagccaggatggtctcaatctcctgacgtcgtgatccacccacctcggccttccaaagtgctgggattacaggcatgagccaccgtgcccagcctactgagtttctttaaaatcagtactttgaattctttatctagaatttcatgaatttctttctgattgataactgtagctggagaggtattgtgttcctttgttggtgtcatatttctttgttctttagttttctgtgtccttacattgatatctgcacatttagttgcaacagtcacttcttccatttttgaaattgctttcataggggaggatttttttcctgaagattttacgtgttgtttgttgagtagggtgctttggctttgattttgagtgcctatagtagtgtgatccctgtatgatttatttggcagtatacaacatcagtggtatctgtgacttcctcattgacttaaggtgcacttattagtgaaggctgtggtgaagtttggctgggaactaagatgctaggtgggccagtcttcaggccctagtgatggcagcggtgggttgaatgagcctgtgctagggcccacagagtggcttaaactgacaacagcgttagtgggtcttggagggccaattattgggccttcaggtgacttgctcagatgctagcagtggcagcagtgggccagacatgtgggcaacttctcaggctcctgggcagctggtgtgaaatgggtaatggcagtagcagtggtggaacaacctgctaggacccaagcagtctgtgctggtgttggtggtggctgtgacaagttgggcaggctagtaccctgacccactggtagcatgtgtgggtgggtgtcagttgtggtggtattggtagattgagttggactgacctcagatcctgacaggaatgattcagatgccagtggtggtagattgggctgggcaatttccgggcccctggatgatgtgcttgtgtactggggggatgggatcaggccagcagacctgtcctcagggccccctgcaatgcattcaggtgctagctgtgatagacaagagatggagaggtccccagaccactggcagaatgctcaggtgtgggctggctgtggtggctgcactgtagtcctgcaaccagggaaggcagggccactctcagctggcgcatcatgagcaagtagctgtgggaagtgtcatctgctcacacctttgtccacaccagcccatagcagcagtggtgggatttgtcctaggaacgtgcggaagtgccccgtctctactctccctcctcaacttagccttggcttggcggcagcagccccagccaggcccaggggcagaatgcagacccgggtggttgagctctcagaataatgactacaggtttgccaccgggagggcaggacccctctcaggtggaagagcaaggacaagtagccacagggagtgcagtcttctcaagccctggtctcacagcagcctgtagcagtggcgatgggatttgtccaggggggtgcatgggagtgctcagtctcccatctcttttttgccaggtggcagcagtagcagcagcaacagcagcgccacatcagtccggcctcaggtcaagacttatgtgataggcattattctgggtacttgggatgcatcagtttttaaaaagtttctttttaaagctcatgcctgtaatcccagcactttgagaggccaaaataggtggatcacctgaggtcaggagttcatgaacagcctggtcaatatggcaaaaccccgtctcttctaaaaacacaaaaaaattagccagacatggtggtgtgcgcctgtagtcccaggtacttgggaggctgaggcaagagaatcgcttgaacctgggcagcggaggttgccagtaagccaagatcatgccaccgcactccagcctgggcaacagagcgagactccgtctctattaaaaaaaaaagagaaaatctatggctctttctgttctcccataaccatactctaaatgcactctttctgtacccagtttgtccctgctttaggactttgctgttccctctagctgatgtgatcttagaccttccctctcaccattctgatttcagctctcatgccatcttttcagggaactcccttctgatcacacattataaaatagatactaggtcactatctatcacagacttatttcacttccttgcatagtgctaattacttttttttttcaattttaacatactgcctgtcaccatttgctggaatataacctccaagagtgcagaactttgttaaccttatcactgttgtaacctagaaacatcctggcacatcacgggtacttaataaatgaattcaggagacatatgaagcctggagataacagatttgagagaatacagaaaataggaggaaaagtcaacaagaaataattcaggcagggcacagtggctcacgcctgtaattccagtactttgggaggctgaggtgggaggatcacttgagccccagagctcaaggccacagtaagctacgagtgcaccatcactagagcctaggtgacagagtaagaccatgtctctaaaataataaaaattcagccagttgtggtgactcacacctgtaatcccagcaaggcaaacacaaaatagtttgctgaaaggtatgaactgggtctttggagggaggtatggggcagggaaatgttcctatttgtaagaagcactgtagaaagtttaccatatgtgcaagtagagttatacaaaatgaaaaactatgaatataaaaaataaaaagggaaaatttacatgagcccacaacttagagaacagagaggaaatatgctctttgccactagcgtaattttacaggtagtttcgtataatcctcccttttccatctttaagatggcaatttaaaaaatcagaaaggactgctgggcgcgatggctcacgcctgtaatcccagcactttgggaggccgaggtgggtggatcatgaggtcaggagatcaagaccaacctggctaacatggtgaaaccccgtctctactaaaaatacaaaaaaattagccgggcgtgatggcgggcgcctgtagttccagctactcgggaggctgaggcaggagaatggcgtgaacccgggaggcagagcttgcagtgagccgagatggcgccactgcactccaaactgggagacagagtgagactccatctcaaaaaaaaaaaaaaaaaaaaaaaaaaaaatcagaaaggacaagaaaaacagttgactgtgttaggatgcaaggctgaatctctgcacattctatttcctctgaggcagtgcttattttccaaggaagaatttttgggtgtgctatactggaggtctcccttctcagggagagtcatcacttgctccaaaacgctggacctcagctcaagggcaccactgcaggaggaataaaaaggtggagccacgcaacaactcgtctgtgttccgcagtaggctctttttgagggacttccagaaatgacagcatgtgtgcagagaacagaaagcaaagttacactgttacagaaggcacagaaggaaaaccttcggctactgctatcagtggaatttctctgtagccagactgaggtctggtggcatttgagatataatatagatatagacctacaaatacagatctccaggctgttcattcaacaagtctttattgagcacctactctgtgcccagcactgcactaggtgccatgagaatacaagagtagtataagatgttatccgccctccaggagcttacaaaactagaggcagaaataagatgtacatgtgactcaggcagcatgtgacacacacaaagtgggcagctctgagacaatggtggtcaagtgaccactgaggcccagagccgttggaacagtctcttataacagggtggaggacttaaaacttggatgaacaggggctggcagagcacttggaatgggtaaggacaagactgggagatcaatttggctggagcaggggagcttgtgttaaactgtgatgatgaggggcacctggacagaggttgggtccgtgggcaatgagaagacatgttactccctctcttgacatgaagacctggtgggcttgtggcctcctgctgccttcctttccctgtcttcccatctccactctctcctaggaaagtggaacctggatgctggtagggccagagacagaggcttaacaccctgctggggaacccggtcagaactcccgaggcaggagaggttctgctccactggatgtttgtcttggtgtttttggatgtgctgatcaagagcaagatgttctggattcttaaaactcccctcacaaggaccaatctagagataatttattgatcagtgatcacagcttgtaccccaaagccgtgtatgtctggatccttccctaagaccacagatagctccagggagtcccacctccttggctatggaaatatgctcagccctggtttcagagaagcctggactccactctggaccccatgagatgatatgcgctggtactccaggctttaaatggcctgggaagcctcagtggattttgtttattttcagcattgccatgtatgcttaactctgagttggggtggggtaggtctgtttaaaatgccagggaaggtgggcagcagagtggatttgtgcaagaaggaacctggggggtttaaggacagcaaaatgatcttaggcgtaattgactggtttttctgaggtcttgccacactgggcaagaaaatgctgcatcgggcccttattccagagagtgcagagctagggccaaggtcgtggtcaaaaaggaaaggagccctcatggactccagggtcagaagttccctcgggaaaccagcaggaggtgggaaaagagccccattagggcagtagatggagcaacagcactgagtgagatttcagggggccacagcaatggggaggtggctaccagtggatatggggtcccctgctccaggtgcttaggccaggcatcccgtccccccattgagagtcctggaattccaaagaagtgaagcatctgagggttggggctgggggcagatgtcagggctcagggtcttagcaggaggcgtgttcctggccacttgagccacaggaaggggaccaggcgccgggtgaaggtggcagtgaaggtgtagatgagttcctgtgactctgcgttggtgaaagtcacggtgcccccttcataatccagggcgatgcccactctccggggccgcagtgctgggaaaagctcagcctcggggctggtgttggcccagatgccggaggaggagaggcgcagcgcccacacgccatcctctggccgcagggagaggtctcccttcctcttcacagagtctctagccacccccaccatgcagctttccagaacttcctcctcttcctcctcctcttcttcctcttcatcgcccaacgattcctcatcttcgtccgtttcccagtcgtcatatccatccccatagccggcctcctcttcctcctcctcctcttctccctcttcctcctcatccccctcttcttcatcctcagaccagccctccctctccacttccacttcccagtagaccttgccccaggtgaagcccttgctgcccagcaccccaggctcacagtcaaactgctgggggtgcaggtaggcactcttgtacaggctggtgtaggtcacgcacttccagtcctctgacagctgcaggtacccactggccgactgtgggtccagggtgacgctcactgtggggacaagggaaaaaaaaaaaaacagcatcactgttttgttttgttttttaagtcagagggaataaaatttattttggcagatagcgttaaacaaaattaaagttgcatacattagtaatataactcaacatccttaatttggtataagtgtgacacattttctggctttgtattctgctaaatcaccataactaaactgctttataaacatgatatactgaaatttaacttgactgttttcgcttacgctctgattccaaacaaaacttttcataagcttcctctatctctggatctctgggtccaactcatcattaatatcatccaagtgtggatcaccagtccctgaaaaatctgttccattttcttcataatccagaaaaaaagtcctctttttcaagtaactcttgatatgcttcttggtaatccggatcagctgcagtgaaaggaacactatgaaacacaataactatgtgaatgaccactataaaatgttggttcattcacatagtaattgggatcttttttggctgttgtatttctgtatgatgaagttgcatggactctaccccaattactgcactggagttctacaagcttcaagagcatctgtttcatgtctctgccacagcttgcatctataacaacattttcaatttcctgaataatttcttccatatcagtccttccttttccttccaagcatcttccaaaactgaccctgtcaacttcagcaattttattgcacaaattaagctgtcatccatgggattagaaaagagggcattcgggcattcggcaactcctcaagaccaacctgaagaatatctgcccttgtaacctgtccatttgttcctctgatctccaggttatgataaagctctcccagaaagggtacaaatgcatgaaattgttttggagtaacttcatccccttttgcagcttgatctttaatgtcatattcagtccgatatctttgaagtagaaattggcggaaggtgctactctctgtgctaactgtcagatgatgtcaggtaattacacaggtgagctcccatgtaagagaaatttggggctgggcacggtggctcacgcctataatcccagcactttggaaggccgaggcgggtggatcacaaggtcaggagatcgagaccatcctggctaacatggtgaaaccccatctctactaaaaatacaaaaattagccgggcatggtggtgggcacctgtagtcccagctacttaggaggctgaggcaggagaatggcgtgaacctgggaggcggggctcgcagtgagctgagatcacaccactacactccagcctggaagacaaagcaagactccatctcaaaaaaaaaaaaaaaaaaaaggccgggcgcggtggctcacgcctgtaatcccagcactttgggaggccgaggtgggtggatcacgaggtcaggagatcgagaccatcctggctaacacggtgaaaccccgtctctactaaaaatacaaaaaattagccgggcgaggtggcgggcgcctgtagtcctagctactcgggaggctgaggcaggagaatggcgtgaaccccaggaggcggagcctgcagtgagccgagattgcgccactgcactccagcctgggcgacagcgagactccgtatcaaaaaaaaaaaaaaaaaaaaaaaagaaaagaaatttgggacagatgtggcctctgagttccacaagttcttgcaaagcatcatctgttgtaacacaagcattcagggtctctgtaaactgttcaatttcagtttcaaaactaccagcctgctctgtaagatggttcaagaaaccctgaacaggtactgacagagtgggataatcctcaccatcatcctcataggattctctataattagaataacctgataggtaaaatttgacggtattcacagacagctcagacattaataaagaagctacaaccacctaaggtttaaccactgctaactcagttctgctatgggattttatcctgtgaactagatgaagctctcagggcctcgtttgctcccagacaggccgacctcctcaatggttctcacgaaagcaagtgtgaaagtgagccaggaggagaccaccagtcttcacaatccaaggggcaccattcacatcttggtctatgtggatggcgctccttggtggttggtatgcagtgtacaacctaactgcagggctgagagggggcacaatagtggggcctgtggtggatatggcctctggtcttaggttgcccctgctgtttgctctgaatataggagccatgcagccaggaagatgagagaaagctcggccacaggaaaaggactggtggtaggacctgtgaggataggaaaaagaaaagcaaacacagggcagagaaggatcagactagcaagcagaggcctctactgcagactaaagagtaggctgattagaaagtgcaaagagggaggggggcttctattgtgcagctgggaaattcttcctgttgcaaaaggggctacctgggggaaaagtgagcagtcagaatctctgcaggcggagttttctatatttgatgtacatctgggaaacaccctctagacactcacctgtcttatattccaagtctctcagcagcttccctggggagaaaaaaggacagcaatgactcaagtcccgaaaatttatgagcccatttcttgctcgggcagtatcaatttcctgatagggatccatgtctaagacaagaggccctcagaagagtgaggatcgacaaggtgatggaaaggagctgggtgcgctctttctacgaggtagccctgctctgactcccaccctttgtgcgctccccaacccttaccctggaattccctcaggcctcgttgcagagagaggagtttatctgagaattctccggtcttttttttaaccactcgagcaatgggtttcccaacccagaacttcttccgtggatacctaagaagatgacatacataacaagctgttactcagctcttcttactttccttcatacttatctctcaatcctcatggcaattatgaaggggagaggaaaggtatgattatccccaaacaagtgacagaaaaacagtggcccaaagacaccagctgaaccagggcttcagaacatcagtagactccacatccagggcgctctgtctactaagccatgtttctaacctctctgctctgtcccacctcaaataaggccagtgggccaaggagctggggctacacagagaactcataaggaggagagcaagtctccagttctcaatgatgtgtcctgctcctcagaaaggcatcaggatgaaccatgggatgtgagtacctctggcaccataccactccccatgaattcaaatgcacctggtcagaagcgggggaacataaacaagggggatgaggtacgccatggagaggagactcttttacctgtttaggaagtctctcgtgtcctagaagggaaagaaaaaagcacaagtatcaatatgaatcaaataagacttcaatgcatctgcacccaacactgtagcagagatgggacatatcagtgaacaaaacaaatgtggtcccttttttatggagctgacattccagtggggtcactgcataaaacaacaagaaaacaaacaaaatcggcacaatgacagaagccacaatggctgggagatgacatgggcaacctctctgggagatacctgcgcagagaattgacggataagaagtactggccggatgaagagaggtaaggtaaaacaggaaagggcttagtgagaacggcagaggccagactgcgcagggctggatatgcatggtaaggagtttcacttttgctccacgtacagtggaaacccaccaagggtttcaagtaggggcatgatatgtgtgatccgctctacatgtggctgagactgctgtgtaacctccagagtccactctccccttcctccttttaataatagaacccccggagttattgctggtcaggcggccacctgggaagactacattttccagatcccctacgacaaggtctggtcatgagactaagttccagccaatggaatgtgatagaaagcaatgaccataattctgggcattgtcctttaaaaaaagaaaattgctttctacttcctttttaccccaactgaattttggacatggtggtggtgagcccaactttgaccacgcagcagaggacaacatccctagaagctggtggaagaaccacatggaagtaacccagtcccttggataagcttatgtacagctactgtgatagctctagaccctgcacctctgaactgttaactgaggcagaaataaacttctattctgtttgcgtcactgtacagcagtgagccaaaaccctaagtgaccactcacttggctgccccacagagaagggactaaggaggcaagaggaacatggggaggttggtccggaggcttttgccgtggaccaggggagagctaaagatggcctgaactaaggtggtggcagtagggagaaaaagagagaagcaatacattccaggtattttagagacagattcaactggacatactggtcaaggataaacaagaacagagcatggtttgtacaggggggagaatggtggtgctatctctgtgacagacaggtggtagggcagggtgagtgggaagagggctattctgagatgctcagattcccttttgtgagtcaaaagcctccttaataccctgtattaattgatttttgccttcctttcactcattccacaaatatttattaagtgcttcctaggtaccaggcactcatctagaagcctcagaacagttaaaaaaaaaaaaaaaaaagagagagagagacaaatccctacttctgtagagctgacattctagcagggggaagcagacaataatcaatgtagcaaatacatcatactacgtgagtgatacgcaccacgggaaaagagagcagagtgaagggggatgggagcaggggccggtggggtgcaggctggcttcctggagagggtgagatttgggaaacaaatggaattaacaaattgtggctgctgatgactgcttccaaaagtttgggaagagttgtgagctttactccagaggaataagacaagaagtcagaggcacatcccaaccccccgctatgaagcaagtgcccagagactggtagcacatttctggccaagtcctctaacatgcccctcaaaacatgtaagtccaaggcggcttcagaggacaggcaacaaaacagacagtgtgtcctgacagctctgctgacaaaggtggcataaaagagcaaatgaatggagcagtagctggagtgtgggccagaggcccatttgggcatatttcctgacatggaagttcctagaacagtagaaagggagagaatcatacaggagaaagaagagtcctctaaaggttaaaggttgtgagcagcccagagagggtgggtcccgagagccagggcagggctggccctgcggagaagaggctgaaagactcaggagcccccatccacagccacatacagggcctctggagggaagtgatccgcccaagtctcctggaggactcttctcacccaagacatctgaagctgtcatgaaacaggcagagccgagcagtggggctgcggcaatgagtcatggcaagctcccggaggggatgtgcccggttactaacagagagcatcaagaaagttcttcacgggggtgtacagcaggagaagcagggtacaagcatgccacctgatcctgcagggcctgcccgggttaccagggcaggatgcagtgtctctctgggcctctcctgtcaccccaatccctttaatgtcttcttgatgctcccagcccataggtttgtctttcctttcctatcacctctatcaaaaggtctcttctattttacacattttgtcctgctgcttctccctctcacctgtatttctattttattttaatttttttgagacaggatctcactatgttgcccaggctggtctcaaactcctgggttcaagcaatctgcctgcctcagcctcccaaagtgctggaattataggtgtgaatcaccacaccagcctcacctgtatttctctatcagacttctggaccctattttaggtctttttcttactatactttgacagccaaataatctctgggaaaatattaatgctaattagggaggtagctgtccagttcccacgcagtacaatcaaactcaaataagcacacagacaaaatctaccaataccatttttctgcgtatggttggttacccagttttcctagcaccatttattaaagagactgtcccttccccattgtatgttcttggttcctttgttgaaaatcagttggctgtaaatatgtgaatttatttctgagttctctactctgttccattggtctatgtgtctgcttttatatcaatacatgctgttttggttactacagctttgtagtatatatatatatgtatatatacatatatatgtatatatatacatatatatgtgtgtatatatatatatgtgtgtgtgtgtgtgtgtgtatatatatatatatatattttttttttttcttttttttaatggagtctcactctattgcccaggctggaatgcagtggcacaatctcggctcactgcaacctctgcctcctggattcaagtgattctcctgcctcagcctcccgagtagctgggattataggtgcgcaccatcacgcccagctaatttttgtatttttagtagagatggggtttcaccatgttggtcaggctggtctcaaactcctgacctcgtgatccgcctgcctcggcctcacaaagtgctgggattacaggtgtgagccaccacaactggctgtagtatattttgaagtaagatagtgtgaggcctccagttttgttctttttgcttaggattgctttggccatttggggttttttgtgactccatatgaattttagttttttttctatttttctgaagaatgtcattcgtattttgataacagggattgtattaaatctgtagactgctttgggtaggacagtcattttaacaatattaattctaatccacaagcatggaatatttttccatttgtttgtgtcttcttcaatttctttcatcagtgttttatagttttcattaaagaggtctttcacctccttggttaacttcattcccaggtattttattttacttttgtagctattgtaaatggggttgctttcttgatgtcttttttagctagtttgttattggtgtattaaaaatgcagtagactttttatgttgattttgtatcctgcaactttactgaatttgtttattagttctaagggttttttggtggggcctttaggtttttctacatataagtatagccgttacggaaaacagtatgagagtttctcaaaaaactaaaaatagaactaccatatgatccagcaatctcattactaggtatttatccaaagaaaagaaaatcagtatatcaaagggatacctgcacactcatgtttattgtggcactattcacaatagttgagatgtggactcaatctaagcatccatcaacagatagataaagaaaatgtagcatatatacacaatggagtactattcatccataataaatttgagttcatggaagtaagacagtagaatagtaatgattagaggttgggaagggggctggggagaggagggtggggagaagttggttaacagatacaaagttatagctacatgggaagaataaattctagtgttgtgcagcattgcagggagaatataattaactataatttactatacattttcaaaaagctagaagagaggattttgaatgttccaacacaaagaaatgataagtgtttgaggtgacagatatactaattactctgagttgattattatatattatatacttgtatcaaagtatcactctaggccaggcacagtggctcacgcctgtaatcccagcactgtgggaggctgaggcaggcgatcacctgaggtcaggagttcaagaccagcctggccaacatggtgaaaccctgactctaccaaaaatacagaaaatagccaggtgtggtgatgtgcacctgtaatcccagctatttgggaggctgaggcaggagaatcgcttgaacccaggagacagaggttgcagaggcaggagaattgcttcaacccaggaggcggagattacagtgagctgagatcacgccactgcactccagcctgggagacagagcgagactctgtctcaaaaataaacaaacaaaaacctctacatcccataaatatatacattatatagcactaaaattaaaagagaaaacacaaaacaaaaaaagaaacctaccagtaccaataacatttcctatactagtttcaagctgacaccattttctctcccttcccttgaccttatcccaccccagggagagctgcaatctgagtgctctgagtcattgagggccaggcttctgctctgagggccacttctctgggtgcattaggaaaaggcacccctccgggcaaacacaatggatttcagccccaccacatcctcagctgtgtgcctctgttccacacagtaggcattcacacatggcaggggcgtgaggagaggaaggagaagagaaacgggcaaaaggagatgcagaaaatgacccagtcaaagagtatgacgagagaaatctgagagaacagaatgacatctggaggaaaagagggggccagagagacattctggacaaaataagaacaagagctcagagcccaggagtcaggacatctgggctcaagctgtgacctgacacccaccccatggcctgggacaaactcctcccactctctggacctcagtgacttcatcagtaggggctgaactggaaggtctaaaatccctgccagtcctcattctgtacatctgaattcacaacaatgaggagcaggtggccgcctccttctgcagtctgtcccagtgcacatactgcagagtctgccttgctatctctccctcctagctattgccctgccattagcctgggactccaccttcctagagatcctgggtggctctgctgctgacagacagacccagccaccctaaacagtgcaagtgggggaataccatcagagagcccctcccctcccagcctatgagagcaggaaggttgagccctctacccctccaaaggggactgggccctcttcagggtaagtgtgatccccagaggctcccgggggggaggagatgtggtgccatttcagcttcacagccagttcttcagccccaaaccctccctttctcactatcaaagccccctcctctaggaggtgccccgaggcccccttgtctgctttccatcttgttctctgtgtggtaatcccatgggccaaagaaaacctggccatctctgtctcccttccccagttaccctatctcttccagatcctctgggtctttgagaggagctgctggtcagccctccctcagccacccccaaccacaacaccataaaaagcttccaccagctgctaaatgtctgccaatgacttgttaagagggcttgtgatggcagtgatgaggatggaggatggtaaatgatattaataatcttcccttccattttctactataccatttagttttttgaacagttttgtgtaaaaagtttattttttgaagtgacagcatgccagttatttcattttatgctcatgcaatctacagactaattggcagcagtaaggattatcatctccatgtttcagatgacaaaactgagcccccaagtcttctaaggtcctgcaagtgaatggcagggctgggacccaccgtcctggtccctggcgccctgcccagggacggcctctcacctgcatgagctctgcagctggctgctgcgccttgccctccagttcggagatgaccagggccagccgggcaagctccccgacgccccggctcttgaacttctccctgccctccgtgagctcctgctccagcttcgccagctgttccagcaggtgttcctcccgctccctcaggaactgatgaccctgctcaaactcagccacaatgtactgcctctggtcctggagcttcttctgcagggggcaggaaggggagaagggctgacacctctgctcagggtggagggcccagtgctggaggtgtgcaaggctggctcgttcacctcgctacccccgttcaggaattctacaggatctggagtgggaggagctacagagggttcctggtccacactccgcttctcaaagaagactccagtaatgaattagttcagttcaccccaccactatatggtcaaaaccctgtctccacctgactggtcagccacaatctgttctagctaaaccagtacgctctggggcccctagagaaactctgtgggtctcactcatgagccgacgcacttttccctcctggacaaaatctgtcacctcttccaggaagttttgcttgattaatgtcatctaagcctgaccagccctctcttcagcaccccactgttcagtctaaaatatctatatgtaccccacccctgccatgtaagactgcatcctgtttcctcagcaaaattgtgtgacgtctgtgcttagggactatgtcctttcctgcctccaaatctcctccccagctggggttgggggagtcctcagtggccctgttgactggtgctgagctgggggcagccatgcacactgagggcctggaggggtccttggacttggctgtctctagcttactgtttccctctccctaggcctaatgactcaccactggccctgaccccactactcctccactgcccacttcctcaacatacacagtttcccagaaaatcagaaccatttgatcagttccccccaaccccatctctaatcaagtacataatgtgctgcctgttttctaactacagttgtcccttggtatcagtgggtgatgggttccaggatctccctccccaaggataccaaaatccaaggatgctcaagttcttatgtaaaatggaataatagttacataaaatctactatatactttaaattatcactagattacttataatgcctaatataatgtaaatgctatataaatagctgttacactgaattgtttagagaataatgacaagaaaaaaaatctgtacatgttcagtagagacgctttttcttttttctgaatatttctgatccatggttgggtaaattcgccgctacgaaacccacagatatggaggaggtcccactgtactggcaaccatgatcctgggcctggacctcactacatacagtgccatcagaattggcagacctgccttagctgttttctagcccttccctctcagttcttaccctggagccagctccctccttctaaaccctctccactctcaggcaaccttgtctctctctctctctttgaaaggaagaatgaagccacaccttcttcagtcccctggcagaagagaaccagcagctggacatgggccctgccttcaaggtgacagtcacagaaaacggaagggactctagctgacatccaggcagcccacttgtctctcagacaagaaacaggcccaagactacacggctcagaaagacagcacttgggctaaaacccaggtctgctactgccaggctgacacccatcctccctgtgagcagcgcctagaaacacctcccagctgccgcctacttgcccaggctcaccctgccctacacgggcgcaccgcctcagggcttcctgaaacagcctcacttaccagcgcggccaggatatcagcttctccctttgcctggaagccctgaattttgtctctgtctctccttagggtactcaggtggttcaggattttttcctgtggaaaaacaagcagtggcaacaggtggatgctctgggctggggcaggaagggagactcaggctgagtcctctgaggactgcaaggtggagcatccagagaaggtggcaaggcaccctcgggggtgaagagggcttaccctgtggggctgggcggccttctccatgaggacggccgtgtggggcctgtgctcccgggactcccggcacatcacgcacagcagcttcccgtcgtcctcacagtagtagtgcagcttctctcggtgtcgctcgcacaactttgcatcctgctgctcccgggtcacctctcccggctgcctgcccttgtccaccttcagccgctcaatgttctccaccaggctggccagttgccacacgggtcggatgttctccttcttaaaaggcttcttgcagagtgggcagacggggcggctccctgagatggggcggacgtctgtggtgcagctgcggcagaagacgtggccacagtcaatggtcacagggtcccgcaggtaatcaagacagatggagcaggtcacctcctcttccaggctccgtagtggggctgacgtggccatggtattcttagttcagagaggtctccgttcactggtgaggacttcttctccttggagacgcgacatagagtcaggagcaagcacagtaaaggggcaaaggtggcagcctgcacagggctgccagctccagcactcagtcaatcgacagacaccaccagctcctacaaggttcacacaatgtcaacgagaagaggaccttatagatctagtccaacttcctcattgtacagataaggatatggaaacccagaaagattagcttggtagagtgaagagcaggacagccactagcctataccttgctgttgggagagcctcaacaccctttccttctatctgttggaaaatcgctgtaatgcaccaactgtaataaaaaatctctcactacctgctgggaaactcataatgatacatatataaatctacaatgtctactgtggacacagtgctccttcactcaactgtgcaaagcacaagacacacgagcagtcatgggggtcctgacagagtcaagagaccgcccgtttttttttttggttttttttttttgagatggagtcttactctgtcgcccaggctggagtgcagtggcgtgatctcagctcactgcaacctccgcctcccaggttcacaccattctcctgcctcagcctcccgagtagctgggactacaggcacccaccaccacacctggctaattttttgtatttttagtagagacggggtttcaccgtgttagccaggatggtcttgatctcccgacctcgtgatccacctgcctcggcctcccaaagtgctgggattacaggcgtgagccactgcacctggccaagagaccccttttgtttgctcctcaaggtttcaggtttcaagaactaagagagggcaatgtgacatggctcaccctgtaaatccaacactttgggtggctgaggcaggaggatcacttgaatcgaggagtttgaaaccagcctcagcaacatagtgagaccctgtctcaactaaaaaaatttaaaaattttttaaaataccccagtgtagtagcatgcatctgtagtctcagctactgaggaggctgtggcagaaggattacttgaatctgggaggtggaggctacagtgagccatgattgtactactacactccagactgggcaacagaataagagactgtctcaaaacaaacaaaaaaccagaaaacattaaaaaacaaacaaacaaacagcactgaggttctttaccaaaactcgagaagcatcaggaagcttcaggagtctgactgtcagcatttccctttgtgagtatttccctgggctgttctatagtttgggtttaatttgcttcccctagaaggctggactctaaacacagccctccagaggagcacagcttagcctcagtggacttgttcttggctgtaactgcctcgtctagatgtcaggaatcctcaggtggctgtggctgctatgtgctgtgaggccttggcttgtacagggagcggggacacacagaaaggactctgcttctgtttacctttgtagtcctgacccagttccaggctgaggttatgagcctcagcacatctaacccaagagcagcctcctgcccctgactctgtgtgacaatacagaagtcacttaagtactgagcctcagtgtatccatctgtaaaatgggaagagtgatacttacctttaagggtttctaagcaggtcatgtgaaagaattatgggaaaagtgctaagcacaagcctggtacacagacggaaatctaggagagaacccacaacccctggtttccaaatccagtgagtgtccaaaccacaaacaaagagttaaattcaaaagtggcagcaaaagaggaagtgagcagaaccagccacagtgacacacgtgctacagagttcaacaacatcgtcacagggcagtacctggaggacttgctctcctatagatccatggaaggcaactacagcagcgctgggaagacaaccagcagggcacagaggtgactgcgaggctggaatgaagcaacctgaattacaggcaaatcaatactattaatgattatgtatggtgaaagtccatcacaacagagttcagtggcctctgtcagtagtgacattaatgggacagaaataaaacccccagtctataagacccaagagtaaacaaaacagggatataacgtccactcattgagggtctagtgcaataatacataaaaagtgttttataacgtaaaaggactacataaatataagagattcttatagtgctgataataaattccaactggaagcactaatggatctaggtatgtgtgactttaagagacataatgaggggaaaatcaagcaccttcaaagctcaaatgaaggattcaaggaatttaactgtcaagtgaaagtaatatcaagttcctacatgttagtaatgctggtaggaatgctaggaattggccgggcacggtggctcacacctgtaatcccaacactttgggaggccgaggcaggtgaatcacaatgtcaggagattgagaccatcctggctaacacggtgaaaccccatctctactaaaaatacaaaaattacccaggtgtggtagcatgcacctgtagtcccagctactcaggaggctgaggcaggagaatcaatcacctcaacccgggaggcagaggttgcagtgagccgagatcgtgccattgcactccagcctgggtgacagagtgagactccatctcaaaaaaaaaaaaagaaagaaatgctaggaattgcctggtccaactccttggctttactgttgaggaaataagcctggctcagcagtttttcagttgtaacatactgcaagtgtttggaaagaggaaaaaggagtggtactgggcgtgtctgtgggctttcaagccctttatcatgcctctttgccaaatggcctagaagtttaaaagctgaggtttttctttgttgaaggatagcctgtgttatctttgggttgggaacttattttgcaatttacttgcaaaataagaacaataaaaggactatgaaggctcagctacagctcttcttccatgcaaaacaggacacctcatcacccaggctccatgctggggtttgatggtctctaaacctcctgaaactgtctaaaaattattgcatatgtactagatacctaaaattgtctggggattacagaagaataaccttctgtaagattaatcagcaaataagtagaagagggataacagaattagaaaatcattttgcgactgccattataatagcacaaggatcatcaatagatgctaaaactattaggtgaaaagttttgggggatgagatagtacccatggtgccaaagcaccaatgaatggattacttcctgacataccttcgtaaggaggagatccagtggttatcttaactaagtgaccaaatccagcgtcatcagcagacggggcaaagtggcatgtgctttctggcatggcactatatgaatcacacaacattacctatgaagtgtttgtgccaaaaatgtttgacttgaatgaatctagtcaagactttagatctaacttccagtttataaaaaatataaaggaaaggaatactctgaagtatgttacaactgaaaaagtactgatggaggaattaaaccacaccataaggaaagaaccagataaatccagaatgctggacattgcacatggcaactggcctagtcttttaaaaagtcaatgtcataaaaaaaaaaccttcgaaagaactgcttttgatttttacagactaaagagaaataataaccaaatgcaatacgtgaaccttgattggatcctgtaaaaagaaaaaaaaggttataaaaatagtcttggaactattgtgggaaatttgtaagtaggctgggtgttagatcatattaaaaaattatttcctctctttctttcttttttttttttttgagacagggtcttactctgtcccccagagtgcagtggaactatctgggctcactgcaacctctgcctccctggctcaagcaatcttctcatctcaggctcccgagttgctgcaacaacaggtgcatgctaccacacttggctaatttttaaaggtttttgtagagaagagttgccactatattgcccaggctggtctcaaactcctaggctcaagccatcctcccacctcagcctcccaaagtgctgggattataggcatgagcaactgcaccatgtctaaaattattttcttaatggtatttactgaggttatgtatgagaatgcctatacttcttatttatttattaatatatttatttatttttgagatggagtttttctcttgttgcccaggctggagtgcaatggcgcaatctggctcactacaaccttcgcttgtcaggttcaagcgattctcctgcctcagcctccctagtagctgggattacaggtgcccaccaccacatccggctaattttttgtatttttagtagagacggggtttcaccaggttggccaggctggtctcaaattcctgacctcaggtgatccacctgccttggcttcccaaagtgctgggattacaggtgtgagccaccgcgcccggctgagaatacctgtatttctaggcaatggatgctgtagtatttagagctccatgtctcccacctaatttgaaatggttcctttcttttttttttttttgagacagggtcttactctgtcccccgagtgcagtggaactatcttggctcactgcaaagcaaaataaaaagctagaaaagttttctggggagggagctacagttttctatcacattcttaaagaggtctgtagtaaccatcaaaaatggttaaatcactgatacagagatcatggtgcttgacaccttgtagaagctcaatacacatttactgaacaagtgaatggattcaggggaactgcagacaatgttagttgtatagaaccatttgtttttgagagtctgccataactagataaatgaaacacagtaccacttctatgaccaatcccttcccttgcttatacagactccttctgaggaaactgaggctcagcagggttaagcaacttgcccaagagcacatggctaggaagcagtgtctggtgccaaggcctctgctcaatccactacactctcttccctacccaggcacactgtaaaatggggtctaataccagctcctttgttaggaagctcagatgaggtcatctacatggaagggctttgtaagcggagtaatgctgacaaaagaaagggggcatatattctgctgatactgaccaaaagcaccctagccttagctatgacaaactttcacatatggggtgagcaataaagtgtccctgttggacagtagttttccttcttagtgatagaggatctcaagatttcagaattaggagaaatgaggttgagtatgagagatgtgagcagaccagaataaccgctccccttccccatacacaattctgtcaggtccaatgcaaaattcaccctctccaaaaactcttccccaacttaccgcaccctgctatggttctgcccttttatgccgtcagtatattctctgtgatctcaacaggtttccacaataagaggtaacaccattacccttctctccattcctgactcctgggcagacagaaaccaaaatcagagccaaaaaaaaaaacctcagagatgacccactccacccccactccctttactcagatgagaattctgaacctgaagaagtcacttcatgaactcccttgcaccagaggtcacacatccctgctgggggtgagggggtatttttctgtctcttcaataaaccagaagcggccgggcgcggtggcttctgcctgtaatcctagcactctgggaggcagaggcgggtggatcacctgagatcgggagtttgagaccagcctgaccaacaaggagaaaccccatctctactaacaatacaaaattagccaggtgtggtggcgcatgcctataatcccagctactgggcaggctgaggcaggagaatcgcttgaacccaggaggcggaggttgcagtgagctgagatcacgccaattgcactccagcctgggcaacaagagcaaaactccatctcaaaaaataaaaatgaaaaaataaaccagaagctagctgcaattctatagaaccaggaagatgcaacaaacaagccctgcaatgtcctggtaccctcctcacaggcagaactgcagacactccctacctttctctaagaggttcccttttccctgaaatccacccctcccctataagtctctggatctcataaatacctaatctgcatatgtcaacagactggtcaaggtgacaccatgtaatttcaagatgtggatgcatgcacgattattggctccaagaataatcactatgagctacaaaaactagctaaaagccgggcacgggggcttgtgcctgtaattccagcactgtgggaggctaaggcaggaggactgcctgagcccaggagtttgagaccagcctgggtaatatagtgagacattgtctccaaaaaaagaaattagctgaattagctgggtgcgatggcacatgcctatagttccagctacttaggaagttgaggcaggaggatctcccaagcccgggaagttgaggctgcagacagccatgactgcgccactgcactccagcctgggtgaaactctggcctgcctccggctcctagatgccacccagagaggtgccctggtagacagtgaatcccaaatgtggactctggggcccaagaaagtaaatggagaggcctgggttttcatcctggcctccagggtaccagttcaggcctctcttgagtatcccaagctgcttctcaagcatatgtctggacctccaaacaagagcaaagcacctgtaatcccaaagcacttagcctagagctccattccctgtgggtactccatttaagggctcctgggtcccagattaatccccatattttaatctgagataagcaaactctccatggggtaaacttccgtgagacacctctaacaaacctggagaggccagaattcggggcaaaaagcaagtgatctggatgtgcatactaggagtgactgcacccctactggccaggccaaaggcctggatcccaggctgtcccaggagatcccagtgactgtggatgatgcgttcttgtggtcacacttggcttactttccccacggagctgagcatcagtggtgctctgaagcacagtgcaggccacaaaaactaccagggctctgaacgctagaaatccccacagggctcaaagaggggcaggaggtagcagccagctgggaggtggatgagacaaggcgttaaattgccctggtcttgtggctgacccacaggggaaaattgagggttcttcatatttgtgccagaatatctgtctaatgttgaatcatgaaccaagctctcttgtctaaaatattcctaagtgtcacttggtgctttgcaccaaatataggaaggaatcctttttcatcttgtggaatggttcaaaccttgactacacatcagatttgtagtcttcaaactggtgagtcttcaaaacatacctagaccaactgacttaggatctccagaggtggcccaggctctggtattaaaaaacaaacttcccaggagattctaaagtctatccaggactgtgaatcactagaaccccttatttacagaggaggaaagtgagtgccagagcctcggactcatttgcccagcagcagagctggctggcagcaaggccagcactagcacgaggtggggtgaggtgcacctcccagctctgggctccttccattccaccatacactgcactttggtgcctggaaaatgaactcttccctgcccatatggagtgctgtggagggttagcctcacaggcagaggaaatcatccgccggagaaagggtagcggtgaatttgaggagctgacaattggccacaggtggagtgcagtgaggcgagcagaggaagggtggagaaacaggagggaacagattatgcaagactgtgacccaggttaagaattttggactttatcctaacagccctgggaagccattgagggtttaagcagcaggatgttgaaagttattcaacagctagcagatgtttattaggtgccgactatgtgtcaggcaccgaggttacagcagagaacaaaagtggcaaactccctgtcctaccagaacttacatccagtgacctgaggaatcctttagaagctgaaatcagatccaactgtgggatcatcaaaccctcaagggtttcctgatttacataaacctcctctcccctttgctgccccagtgctgcagccactctggccttttgatcctcaaacacactcggtcacgtgttaaactgccaatctgcccgggtgaccaaccaggttaaacccctcaatggctttctggtgctccaggaataaagtcaaaactcctgtccttcctttcttctgtgaggaggctgtcccaggagatcctagctggattcccagataatcatggcccagcctgtgtctccaggctcatttcctgccactccccacctcaaactcacagccaaaccaaaccgctctccatgcctcaaagtgctatgctctttcctggctaagcccttcgacaatgtaattccttctgcctagaacaccatccctttcccacttagcaaatgccttttctagcttgaagtctcagctgaaagccacctcctctggcaattctttcctgacctgtcagattgggtccacatgtagtctagttatacagccccaaaacaccccatgctgcaccctgtacttctctgcagttttaagtcctgacttattagtgtaattactcgcttaacaccagctttttccatgaaacaaggagagagattgtgtctgtcttatccccagaatctacatattacttggcacagagtagacaataaaaactgactgagaaaacaaagcacaagcacagagtatctgacacaaagaagatgcttcctacacatctgctgaaggaatgcgaacaatcttagccacctgccctttctctccagcaagatggtagtaaattggtagagagagaagcaatttcttcatattccctgtagcagcaagaacagtgggctgcacgtcaccagcaaatcatcgtatccaaggtttcgctccagcaacttacagaaaccaggagaagaaaaagctgtgtctgagaaaatggttgttgtggagtaaattgtaatagtgagaatcactccttcccttttctttagttttagacctaggtatacaccccataaacagagtttattttctcaggttttgagcctcaaatgaatggaatttttttcctttttttttttttttttgcatgtatttgggtggggggctgtcaacatgtttgtgaggctcatccatgtgattatgagctgattttacttaattgctgctctctaactatacaatttttaatgcagtctactgatagccatatgagttgtttccagtttgggacaattacaaacactgcttcagtgaatatttctgcatacatgttctagcacacacaggcaagatgtaccctcaatttgactaagcaggccaaactgtttccaaagtgactatagtgctatgtagtctgctcagcaggctatgagcactcatgatgccccacagcctcaccaacacctgataatatcagctttaatttttgccactctggaggatgggatatagaatatctgtgtgtgtgtgtgtgtgtgtgtgtgtgtgtgtgtgtgtgtgtgtgtgtatttaactccccaaaaggaaacagcatgagacaggcccaataacaggccaaggaatcctatagcagcagaccagatattgtgctcctcgacccaaccagtaaatgttgtaaatgtttatctttggggagagaaggggaagggcccacccagcttctgttcttctttcccttggtaacttaccatctatgagttagtgagatggagacatcctaaccattaatccagggaaagggaggaatctaagccatcagcaagggagttagtgcttttcatcaaatttgagacacctgtgacatcacattttagcatctctgaaatgtgatcaattgcatgtcataatttaactggcaaaatatttttttgatgtggagcataaaataagggcacataaaagatttggtggtgctgtggtttgaacatgtcccccaaaagttcacgtgttggaaacgtaattgccaatgtaacggtattaagaggtggggtctttaagacgtgactgggtcatgagggtgtaactctcatgaatggattaatgcctttcttgcaagagtccattggccagaaccgtgagctgaataaacatctgttgtttacaatttacccagtctgtggtattctgttacagcaacagaaaatggattaagacaaatagcatcttagatttggtgagatgtggcatatttcctaaaaagtgctgccaggatcatccttctagcacacaggatctcatccttgttattctcctgcttcaaatctcctagctgaggctgggtttggtgcctcatgcctataatcctagcactgtgggaggctgaggcaggaggatcccttgaatccaggggttcaagactagcctggccaacatagggagagactgtctctaaaataaaataaataaataaaaataaaaataaaaataaaaacaaacacaccaaaaaaactcctactagctgaggtcaaaactgcacaggtggccgggcacggtgcctcacgcctgtaatcccagcactttgggaggccgaggtgggcagatcatgaggtcaagagatcgagaccatcctggccaacatggtgaaacccagcctctactaaaaatacaaaaattagccgggcatggtggcacgcgcctgcagtcctagctactcgggaggctgaggcaggagaatcgcttgaacccaggaggcggacgttgcagtgagctgagatcacaccactgcactccagcctgggtgacagagcgagactctgactcaaaacaaaaaaaaaaactgcacagacatcctcccctgccctgcatccggctagccccaacttacccatccagccccaaatccctcctcgtcctacctaattctctggccattagatacactgaaccaggaagacagccccttcttcactccccactctccacccattcccttgtacatgctcttctctccagtccagcgcatccttgaaggcttgaatacaatttgtccccttatctgtgaggtgtttcctgtacccatcccacctctgagttgaatgtatccctcctcctgcagctttgcatatactgtatttctacaatagcactatcacagtgcttcatacagtagcaccccccatccgctaaagatacattcatacaggagtcccctcaatcctcaggagatgcattccaaaacccccagtggatgtctgaaacctgtttctcctacacatacacacttgtaataaagtttataaagtaggcacagaaatagattaacaataataacacaacagaataactataacaatataccgtaataaaagttatatgcatgtggtctctctctctctcaaactatcttgtactgtacttacccttcttgtgatgaaggaacagtgggagggcaagagatttcatcatgctactcagaacaatgcacatctaaaacttatgaattgtttacttctggaattttctgtttactgtctttgggctgaggttgaccatgggtaacggaaaccacggaaaactaagctatggataagtggctgtaattgatatttttatctgtcttctctcccaccagaatgtgaacccaaaggtcatgcctcactgacctttttatctccaatatctggcacaaagtagggggtctgcaaatgtttgtgaaatgaatgacctcctctaattccagagccctgccatctccattcttccccctttcactacacacccccctttcccacattaaaattctgcttcagcagcaggcttccagggctctctttagattagacattcttgcccacacacattacctagatctctcttggcctccctccacacacacacaattttggggggaagaacaaaattccatttctataaagctggcaaaatctaattcatcctgatgccagccaatttatgtttttgtcttctcaaaccaacttcccattctccgtgtcttttctattctgatcctgggggggtccaagtctgaagtcattccaagaagcctcaatacagaccatggactctcttcgggggtttgcagtgtcttctgtggtggtcacacacaatctgagtccaacctgttactcccctgcaggaagtgatatctaagaagtcacccactgccttaggccttcagtctccttacctcttaacaaggggaaaatattttgccaagtttaccaggctatttgaggttgaggcaaggtcacataagtacgagtgtctcattagcaaaaagctctataaaaatactatgaaagagcacaggagccaatgtgaaaagagctcccaacagccaaagccacagtaatttgagcaacaaaattaagtagtattggattataaaccaaagtataaaataaatgtccctgagtctacactgaaattaatgattgaataaattaataaattggggagaagagagaaacaaatcttccatgcagaataactgcaaacaataatatgtagatacttgccctcaagaagggggaatataactcttggctccctaggtatgggctgcacttagtgacttccttctaaagaggacaatacacgcaaagagtggaaaagagactaactgtacagtggagaaacctgaaaaacactatctcacccaaatcaatattaagtcataaatcatgttagtacatgcccttgatacgatgggatgataatggcaatctacctctgtggtcttcctcccagttacccataagcccagtcttaggagaaaaacatcaaattccaatagaggggcatcctacaacatacacgaccagtattcttcaatgctgtcaaggtcatcaaaacaagtctgagaaactcccacagccaagaggagcataaggagacatgacaactaaatgtaatgtggtaacctccatgggatcatgaaacagaaaaagtactgaggtaaaaactaaggaaatctgaacacactatggactttggtcaataataatgtattgatattggttaactgcaacaaatgtaccacactgaggtaagatgttaataacaggggacccggtttggagcatgtgggaagtttgtactatcttctcaattcttctgtaaatctaaaagtgttgtaagaaataaagtctacttaaacaataaaattgcaatttttgaaacataaaaagcctattttttttaaaggtgatttttttgaacttggggaaaaacatgttagggattatgatttcagctaagagttaaaaacaggaggttaaggcatgcataaacgaatgtcattctcccctcttttgaagtacacacaaatcgtgggtcaaaatttgaaatctactggagatttggaagtgtgtccctcccatttactccacagagttaaatttacactttttttctaaggccaaatagggagaaaatcagtaagaaaaatgctaatgagctggaaggagtgaaagcacagctccaagtatttgtggctaaaccggtttactccgaacaaaaaaaaaaaaagaaagaaagagaaagaaagcatgacactttggtcagggagctggattagtcgcctatctaccaggctccaagcaaccggacggtcatccaggccccgcttacttctggttccgcagactagaatggatgggagtctgagtaggataccagaaagcgagaaagacccaagaggagggggagaatgtaaggacaagcaaacaggagggatctggctggcagggaggacgcagcgaacttgaccccctcctgagcccgcccgggggcctggccccgttttgaacccgggcccggcggctgcgttgggtcgccccaaacccggtgagcgtacgagactgttgcttcgctgtatgtctcatgtgcaccccctactcaccggtcccgagctccgggccgcgaatcccggccggcgcccctcctctctcacggcggtctgttccgggtcccgctcctgcacgagcaaccagcgcgacagctcgtccccgccccgtaatctcccggctattcggggcccttcgccgagatttctcccggaccagccccgggattggctcctgccgaacttcgccgtccaatgggaaccttagtctcttttacgtcactgatcaccgggcaaatccccagacagccgcgggcggtggggcaccaggggcagcgaaatggaaactgaaatcaggcgggaccgaggctgcgccaagagccgcagcctgagtttggcgcgtaattggggtggcctgttacacggtctaagggagtaaatgctaaggcttaggagtcacctacgtaggactcttgagagggcaataatcccctttccacctctcgagacccctcactgcccaactctggccttatgctggatccagggtccgagggcgctttgaggcgaaggtggcgctcgccaggtgctcaacattaaatacgaagtccccgcccctaacgtggcctaaatttgcttccaggacaaagcaggattttagcaagcaaatactctcagagacctatttacgaaaattattacttcctaggtaaaataacgttcaaccagacagccattgtcgccattcgacggaaggaaaaactgaggttccaggagcttaagggtctgggcccagttcaggggggttgttttcgctcctcgacgctgaatttagaaaccagaggctacaaagcgggccaagacttgggttccccaggtccttggtggggaggtttccaggaggctcgggcgcgcccccgtccacggccccggaagctgacgtcgccgaagcgtacgccgctgcccagcctgcgctctcttcctgctctgcctgcagccgccgcgtccggtccagccgcagggccatgccctgtgctgcggttgccgtgtcccaggcgccgccgcgtcaagatccccgtctttcccggccagccaggcggcagcggcattcagctcgtgcactgggctggcagcaggctgagaagaggcggcgcaggttctccgggtcagccagtgccctgctcctaagggtagagatctagctggggacactggtcgtccgcctaggcagtggtgagagggtgggctacagttgtttggtattcatgaatggaggagctcagggtcctagaccctaaaacctgctgaatcttcacccctcctccgctgggggtagggaaatttgcactgcatttaagcaatgtatagtggagtgggtgggacattcagaagaaaccacgcccacatttaacacccgcgtccttcccttctaccccagcccagcattttgtctttttcccctttgtccagcagtataactcacgctgcccctccgggctgagaggagtgtagacctcacctgctgagcacaactctggcgggcctgtgctctggaggtggtctcagcacctacctagaccctcttgatacctgcttttttagttggtggtgtgggaagaaagtgtgtttaacatgctccttaaataatgctctgccgccgagcgcggtggctcacgcctgtaatctcagcactttgggaggccgaggtgggcggatcacgaggtcaagagatcgagaccatcctggccaacatggtgaaaccccgtctctactaaaaatacaaaaattagccgggcgtggtagcgcgcacctgtagtcccagctactcaggaggctgaggcaagagaatcgcttgaacccgggaggcggaggttgcagtgagccgagatcgccccactgcactccagcctggggacggagcgagactccgtctcaaaaaataataataaaataaaaaataatgctgtgccactaagcgttttctccctgtcctgaggtctttggcctattcacagaccattctgggcagactccagccacaaatccaccaccccacttaaaattctctatcctctcagcacacttagaggggcatggaagactcttgcaggggctggggctcctgacatgacagctctgcttaactctctgacctccctcatgccacttctccctcggtccctgtgctttcaccttacacctggtcttgaaactccctgccccagccccttgcatggctgcccgcttcttgtcagtcatgtctacatctcagaaaggtcttcctccctcacccagttgaaaccagttccccatcatgcattattctgtttccctttcttcatgcatttgttgccatttgaaagcaccttgttcatttctttgtcaatgtgtttattttcgatcttcctccccctcagtgtacgccccaagagagttgagacaacacctgtcttccatgcacatggcttccatgtaaataaatgtttgttaaatgaaatgagctcagtgtgggcatttctttttctttttgtaaaaaaattttattattattacactttaagttttagggtacatgttcacaacgtgcaggtttgttatcatttagcattaggtatatctctcctaaagctatccctcccccctccccccaccccacaacagcccctggtgtgtgatgttccccttcttgtgtccatgtgttctcattgttcaattccccagtgtgggcatttctaaagctgcctggccctgcttggctgggtatcagtcatgcactgagtccctctcccaccacactacatcttgattgatacagcttctcaagtccaagtaagggtaacagaaatggatgctgggaacacaatttctgctttgtgttggaggagacagctttggagcagctttgtagctttgtgcccctctacagcttcctgcttcatttaaggttctgaagcagagttgaaattccttcctccagctctccatttctgtggtcataccagatggaggccaaggcagcatatggggctgggtaagagttctgcgttgaattctccagtctgccacattctgtgaggctttggggcagctgctcaacctctgtgtgccacaggttcttcttctgtaacatggaagtagctagatctgcttcgtacggttattatgaggcttaaatgtaaagctttgaaatagtgaatcagtgctgactaggccaaagggtatggtataattatttgcatttgaaataaatatcttaaatggagcaagaagatttagtaggtatattccttgagcagctctggtttaacctcaggaggaactaaaggccgctgtctaaaaatgagtttgtatatgacagggtacaggaaatgccaccccaaaatatggcaccttggaaattgagaaaatagcagaaacaggaaggtttctctgacctcttgctcctttctgccctgaagcaggccatagaaactagagttcccctcgccccttcttccctgaagcaggccacaaaatctaggaaggtcactctctgacctgctccctccttctccctccttcatctgaggccccttatataacaggcatcctctcctatgccctgagggagggactgccacacaggtatgccaagaagaaactgaatagacaggcctttccaacttctcagtttatcaccgttagctcatacacttttgtccttgcaatcatacatctgcctgactgtctatacaactacacaaatgtccccatttctttgggttttcgtttctgaaagttcccatgtcatgtaaaacttggataaaataaatgtgcatgcttttctcttgttagtctgttttttgttattgaagtctcagcataaaccttgtgatgggtaaggaaaatatattagtttttttcccctaagtttagtataaacatattgagctaaatcataccattcagaatctcaggattttaagaatactagagtgcttggaaagaggcctccaaacaaaaaacaaacaaacaaacaaacaaaaacttgaaaacatgaaactcccattggtaaagatgcaaagaatctgtttgaatcttttgtgtgaaggataccttggtattagggccagaatgaataaatgaatatctgtaaaggaaaaggtaaaagttacatcaatgaaacaattttaagccaacatttctgttttctggtagaggcataagctaataaataacttttgtgctactaaaatctgcctgcttttgtgctaagaactggctgcaggataaaaaataacaggtttaactgtcctttttaaaaggaaaaaaaggcattttgaatgctaatagcattaactactgggttttgaacagaaagcgtaggctgaaccaatctcttatatgacttgggatgtcatttaaaatactttgtattccaaatttggtgacttttaaatgtctattagctcaaaagttagtgaaaatatattgtataatatataatgacaaattcaacttaaaaaaaaattttttttttttttttgaaacagggtctcactctgtcacccaggctagagtgcaatggtgcaatcatggctcactacagcctcgacctcctgagctaatgcaattctcccacctcagcctcctgagtagctgggacagatgtgtgccaccatgcccggctaatttttgtattttttgtacagacaaggtctggccatgttgcccaggctggtctcaaacttctggacccaagcaatcctcctgccttggcctcccaaagtgctgggattacaggcttgatacaacgcgcccggccgacactgtagcattttctaataggcctacgtaaaaattatctaattctctagggtagtttaactttgatttagtattttagggtatttagagtactccttaggggtagacattaacttgtagaaaagtgatatcaatggaaatgattcttggtcaatagcaatgtcaatgaattttgttcagtggaggtatagaagatgtatgtccagtgtatgtatattcaatcttccaaattctctttgaactagttctttttttactagtctcttgttagtacatctttgatacatgctcactttgtataggatactgtcattgacttttaaaaattatattttggcaatacattgcattttattattatgtctcttaatcttattataacaatctacccttcccttattttcattccattaatttgctggagaagccagttcatttatcccatagaatgttcccagtactggatttggttgattgcttcctcatggtatcaattaacttgttcctctatttcctgtgtatcttagataagattcataagataataaaggatgctatgtagtcatctctcattctaagcaatcaaacattttcaatatctttcaccatatgtccctaacccagatactactagtccgtctctctctgctatagaggtaagcatcactctgcatttctgtgataatcattccttagcttttatttttatttacttaaaaggctttatcagatttggggtttttgtttgtttgtttttgagatggagtctcgctgtcatccaggctggagtgcagtggcacgatctcgggtcactgcaacctctgcctcctgggttcaagtgattctcctgcctcagtctcctgagtagctaagattacaggtgcccgccgctatgccaggctaatttttgtatttttagtagaaacggggtttcacaatgttggaccaggctggtctcaaactcctgacctcaggtgactcgcccgtttcggcctcccaaagtgctgggattgcaggcgtaagccaccgctcccggctgggttcaattttttaaggagaatacttcaaaagcagtgctgtgtacctatggtatcacatttagaggtatatgatctcatcccactattagtgatggtagatttgatggaagattcaggtattgtcagcctgatccctccattccccagtttgtgagttatggatttactgcctctcagctccaaaaatgatcctgaatcttttaattatgttttctttgccatctggccctgaagctttgtcagtagagggcactggagagtcattgcagggaaaaacgattttgcttccaggttctggtgtgctgtttgccaggttcctgcagtgagtgcatggtttagcagcacctgctcctgcagcacccaaaacttacctagtgtccagttacttcagtcacagtcagcaacacccagcagtgagcagcttccttaggcacccctcctgaaggggttttatactggagtgtctctggtatgaacagcttttgcctgcaccctagagagtgggtttccagcaagttctgccatagcagaaccaccttgatgtctctactctccctgacaaggctagatcccatcctctcttgttttctcaaaaatggactaaccatctataaatatctactctcctgcttcagcaaattttttttaccgtttcactgaattattctcatgagcatacaaacatgttataatatatcgctttaaaaaccaaaacaagacaaactccttgataccataagtttttttgtttttgtttttgttttgtagagttttgctcttgttacccaggctggaaagcaatggcacgatctcagctcactgcaacctccgcctctgggtttcaagtgattctcctgcttcagcctccccagtagctgggattgcaggcgccccccaccaccactcccggctaattttgtatttttagtagagacggggtttcaccatgttggccaggctggtcttgaactcctgtcctcaggtgatccaccacccccctccccgccccacctcggcctcccaaagtgctgggattacaggcgtgagccactgcgcctggccagtaacataagtttttaaaaggtttttgcttcaggtactctcctattttcctgctccacatttacagcaaaattagaaaatattgtctgtacctgccctctgtttccttttctctccttctttaatcaaaaactgtgaaatatatattcaaaagtgtacatataatccatatacacattttaaagtattgatgagataataaaggatgttatgtaatcatctgtcactctaagcaatcgaatatttccaatatcttttattatgtgctcctaaccaatagatcactctccctctctctttgctagagctgcatttttttgtgataatcattccctagcttttatttttatttttattttttgagacagaatctcgctctgtcacccaggctggagtgcagtggcgcaatctcggctcactgcaacctccgcctcctgggttcaagcgattctcctgcctcagcctcctgagtagctgggactacaggcacgtgccaccactcccagcaaatttttttgtatttttagtagagacagggtttcaccgtgttagccaggatggtctcaatctcctgacttcgtgatccgccccatcagcctcccaaagtgctgggattacaggcgtgagccaccgcacccagcttttatttttatttttaagagattaggtttcagtcagtcatccaggctggagtgcagtggcacaattatagctcactgcagcatgtgaactcccgagcccaagggatcttcccacctcagctacaggctcataccaccacacctagtgagcttttcttttcgtttggtttcacttctttttctttccttttttcttttttttttttttttgagacagaattccgctcttgtcacccaggctggagtgcaatggcgtgatctctgctcactgtagcctccgtcttccaggttcaaacaattctcctgcctcagcctcccaaggtagctgggattacaggtgcccgccaccacgcccagctaatatttttgtatttttagttgagacggggtttcaccatgttggccaggctagtcttgaactcctgacctcaggtgatccacttacctcagcctcccaaagtgctggtattacaggtgtgagccaccgcgcccggtcccagtgaacttttcttcttattattatttttgtagagatggtgtctagctatgtcgcccaggcttgtctcaaactcctggcctcaagcaatcctactgcctcaacctcccatagttctaggattaaagacaagccaccacaccggccatcctagcttttctttttatttatttatttatttattttttattttttagtgtttattgatcattcttgggtgtttctcggaaagggggatgtggcagggtcataggataatagtggagagaaggtcagcagataaacacgtgaacaaaggtctctggctttcctaggcagaggtccctgcagccttccacagtgtttgtgtccctgggtacttgagattagggagtggtgatgactcttaacgagcatgctgccttcaagcatctgtttaacagcacatcttgcaccgaccttaatccatttaaccctgagtggacacagcacatgtttcagagagcgcggggccgggggtaaggttatagattaacagcatcccaaggcagaagaatttttctcagtacagaacaaaatggagtctcctgtgtctacttctttctacacagacatagtaacaatctgatctctctttcttttccccacatttcccccttttcttttccacaaaactgccattgtcatcatggcccattctcgatggtcgctgtctcttcggagctgttgggtacacctcccagacggggcagccgggcagaggcgctcctcacttcccagacggggcgggtgggcagaggcgctcctcacatcccagacgatgggcggccaggcagagatgctcctcacttcccagacggggcagctgccaggcagaggcgctcctcacttctcagatggggcggctgggcagaggcgctcctcagttcccagacggagtggcggccgggcagaggcgctcctcacatcccagacggggtggccgggcagaggagctccccacttcctagatggggtggcagccaggcagaggctgtaatcttagcactttcggaggccaaggcaggcggctgggaggtggaggttgtagcgagctgagatcatgccactgcactccagcctgggcaacattgagcactgagtgagcgagactccgtctgcaatcccagcacctcgggaggccaaggcgggcagatcactcgaggtcaagagctggagaccagcccggtcaacacggcgaaactccgtctccaccaaaaatacaaaaaccagtcaggcattgcagcgcatgcctgcaatcccaggcactcggcaggtcaaggcaggagaatcacgggagcccaaggcagggaggttgcagcaagctgagatcacggcagtacagtccagcctctgcaacagagggagatccaagggaaagggggagagggagagggagaggccaaggcctagcttttctttatacttccttgatacatgtatgtatccctaaacaggatattgtctagttttgcctatttttaaactttgtatacgtggaattgtaatgtatgtgttcttctgtgacttgtctttatttttgagattcaccatcttgatgcatatagctttggcttgttcattttcactgctgtgtggtattccaaatttgaaagtcccatgtttttttcttctccattttactattcttagaacttggtttgtcttcatagttttgctgttatgaccaatgatgctatgaacattctcatacatgtaccctggcacatacctgcaagactttttagaatatgtaactagtaatgaaatttctgagtcttagaatgtggttgcagtatatatagtgttactttgtgaggggagactatttcccaggggttgtataatctacattccctttagtggcagatgaaattcccattaaaccacatctgcaacttcacttggaattgtcagacttttgactttttgccattttgatgtgtgtgaaatgttatcgcatttggttttaatgtgcattttcctaattattaatgaagctgagcatttttcttttctttcttttttcctttttttttttttttggccagttgtatttctctttctgtatagtgtcttttatgttttttatactttcttctattggctatttttagttttcttttggatttgttaccaaaatgccaagggtttggtctaggttgctcactgcacagtaagccaatcactgagacaacaagtattgtgagggaagaaggctttattcaggtgttgcaaccgaggagattggagatcagtcttaactctgtctcctcttttcaacagattaaaattaagggtttatagagcagggaagaaaggtaactacatatgggaaaacaggaattagggaggggaaaggaagaggagttggtcaacaggcagcctggggtcagttaggcagtcatgaagggtgaggggtctggtgtcttagcagatgcagtgaaaggtaagtttcagtttcctgatactaccagggagccctgatcgtcaatttcctgagaaaggaactcagataagacaaatgtaagtttctcaagttttaagacttgtagggtaaatttctatgtttattaaaagaaaaaaaaacataatcagtcctatgggacaaatgggttggtttcagatttatgggaaatatttgttttttgtatattctggacactaattccttgttggttatatgtgttacaaacatcttcttggagtttctggcttgttgtttctctctctttatgtcatcttttgagaagagagaagcatttgttttttcattctaaagtagctaaacgtatcaatctttatgttttggactcttggtctagtttaataagtcctaccttgtcttgagattacaaagataatctatattattgactaaatatttttcagtttagctgctatagactgaatgcttgtgtccctcctaaaattcacatgttaaaacctaatcctcagtgtgatggtatttggaggtggggcctttgggaggtgattaggtcatgagatcagagcactactgaatgggatttgtgcccttatgacagagaccccaaagagctcccttgtctcttccaccatgtgaagacacaatgagaagttagcagtctgcaacccagaagagaacattcatctgaaactgactgtgcaccctgagctcagacttcccctacctctagaactatgagaaataagtggttgttatttaagccacccagtctatggtatttttgtcatagaggcctgaacaactgagacatttgcctttcatatgtaaatctttatatatctggaattaatttttgtgtttagagcaaaatatatatttgtttccccttttttccatatggttaactaattatctcagtgtcatctaatgcacagcctctaattttccccactgttttacactgcaagctctgtcatatgttatatatccatccatgccttcaccaatactcattgagcatctactttatgctaagtgctcttctgggtcctgggaataaagcagtgacaaaacagacaaaaatcccagtggagcttgtgttctgttggaggaaggcaaaccacgaacaaagtaataaaaaatttgtaatactccggatgcagtggctcacacttgtaatcccagcactttgggaggccgaggcgggtggatcacgaggtcaggagatcaagaccatcctggctaacatggtgaaacactgtctctactaaaaatacaaaaaattggctgagcgtggtggcacacacttgtagtcccaggtacttgggaggctgaggcaggagaatcgcttgaacctgggaggcagaggttgcagtgagccaagatcctgccactgcactccagcctgggcgacagagcaagattcagtctcaaaaaaaaaaatttgtaatattagatggtggtaggtactatgaattaacacaaaccaagaaggggaacagggagtggggagaaaatattacaattttaaatagggaggttagagaagtccttacagagaaagtgatatttcagcaaatgcctgaaagaggttagagagccagctttgagaatatctgagagaaatgtgttctaggcaacgggaagagtctgcacaaaggccttgaggcagaagcatgcctagcaagtataaggagcagtagggatgccagtgtgtctggaccagagtgaaggaggggtgaagtgcaggacatgaggtcatcaggtgaagtgcaggacattagctcaacagaagtgagcgggtccaggctgggtaggaccatgtggcccattctaaggactttgattctactttgagtgagatggatggcactaaaaggacaaaggactgataggctctgactataggctttaactcatgttttaatttctctggctcctctgttgaaaatagaaccaaggaagcaagaatggaggtagcaacatctgtcagaaggccattgaaataaactaggcaagtgatgatgggggttgtgggaaatagtcaagttcagaatacatttgaagatagaattaacacaattaggtatggtgtgataggaacaatagagacaaggattatgcccaggtgtttggcttaagcaactggaaggatgctgagatgggaaagacttgatagagggtaggggcgtgggcagggacagaccaggggagaggatttggatctgattttggatatgctaattttgagatgtctattagacatgcaaaatgtagaccagactctcgactcatttaaactactattagtggctagccttttctcttaccttccagatttctgggcaacactccactcttcctgatgcacactcttgcgttgcagcctgggactctacatttcaagcaagatattcttacacataacaaagcttgaaaagcattgctttaagctttcctttgtctctccaagtacctccaaatgtgtatttaatgcttttataatcagaaaagtgttacaaaatcaaatacccaaaaaaaattccctattttcccagcataccatacaactactttctacagagtttccaacattttgcagtaaaatcattgttcacaatttttttgggtcacagtttttggcaaatgaagcatggtataggatgcctgggactgtggagtttcccaggacacaggactttccacgcaaaaccagaaaggttccggacaaaccaagaagagttcttcaccccagacgtgtgaaaccagtggcaaagtgcctgctttagggaaggcagcatgggacagtgaatcagagtggacactgaacctgggtccatttgtggaaggtggtcctgttacaggaaagaggtcccaatccagaccccaagagagggttcttggatctcgtgcaagaaagaattcagggcaagtctgctggagtgcacagcaaaagcaagttcagtggtgaaagaagagctaccccatagacagagtagggcattccagaaagtaagaggaggaacgcgtccaccctaggtacaatgcttatatatatatctttatatatatatcatatatatatatgataaaagaagatcatgggaagatgtgctctgctacaagagtttgtgataaaggattaatttccttaattactatgttttgcaagaatcaatattattatctttaaagcaaaattagaagtgcctttgttctccaggtgtcaggattatctggacattgctaaatctgggtcagtttagtaaacttttttttttttttgagacagagtctccctctgttgcccaggccagagtgcaatggcacaatcttggctcactgcaacctccgcctcctgggttcaagcgattcttctgcctccatttcccgagtagtcgggacaggcacatgtcaccacacccagctaatttttgtatttttagtagagacgggtttcacgatattggccaggcaggtctcgaactccttaccttgtgatccacccaccttggcctcctgaagtgctgggattacaggtgtgagccacctttcctggcctagtaaatattattaatctattcccttaaccataaatgtctagaggctaggaatacctatatttctggaaatgcaccccgccaagttgcagcctcattttcctagctctcactcaaaatggcgtcgctctggttggaatgcctctgacagtctttatgaatgataaaagagtgtagtcaatcataaagctctgactcactcccagtttgccctttccttcctagagaatgtctttcaggctcttcctcccctcagaagctttcaacatccactccattcccctaaactggggaccgaggacattgcagcttctttggtgcttctagggaccagaacatagcttcttttagttatggattaggtttttattgctgctgtaacaaattaccacaaacttagctgtttaaacaacacgaatgtattctcttacacttctgcaatgtcgttggtgggccagattcagattctgggccacacaaaagaatttgagagtgagtccaaaataagactaggcaaaggagtttattgcaaagtgaaagtacactctgagaggcagagtgggctgctcaaagctagctcaaagctagaggcagtagttagtgccttaaggggaatttcctttgtggaaactgtacatacatattaataaaatactggtgagatcaagtaagcaaaggcagacctgtggttagcacatgagctacttggtctaacacgcatcccatgtatcattagcgtataaaatccccacgtggtggtgtgttttttgctattacaatgaggaaaaggtcaccataagctaaaccttgagcctagctgtgtatgcaagaccctggagaatttcccagtcacacctccacccaccccaaccaaggcaggaatttgtagctaatagcttcttgggcttttggtgctgattggctggagatgggtagctacatcatgaacaaagggctttcgttctctttcccaggctgtatagggtatcaagaacttgtaaccacctggcagaatcctgcaggactgcttgtcttgcaaaagacttcagtgctgatgcaggagggtgcaagtgaaaagaattcactgtaaaaggagccgtggggcttcacacatgggacaagttagtatggcctcctaaccttacttatcttgcctcagtaggtcagaggtctgaaacaagtctcaatgggctaaaatcaagttgttagtgtggttgcatctctttttgaaggctttaggggaaaatttgttttctgttcattctggttgcttgcagaactcaattccttgtagttggaggactaggttcctgtctttttactggctttaaacagagctgttaacagctcaaagggctgtagaattccttggctcatagcctcttttctctgtattcaaatccaacaacagttggttatgtccatctcatgtcctatctctctgagctacattctgcttcttcttctttccacttttattaaagattggtgtgattagattggacctcatacggcctaataacctccctttttacaaagtcaactgattagcaaccttaattctcttttgccgtataacataatatagtcaggttctagggattaggacatggacatcttggggatagggacattcttctgccttctacaagttatatgggatatattgaacctctaatatgtgccaggtgctatcataggttctggtgatacagtaatgaaccaaacaaaggccccaaccttcatgagcttatgtctcagtgaaatcccatatgcaatactatgaatgtatctctttgtttattttttagtacaccttaaaaatagctttattgagtccaactgatattcaataaactgcacatatttatgtttttcatgctctctcaagatgtggaacaaaaaaatagcacacatatttttgtacctgcctggcaaaaattcccaaagctttgcttaattctattcaggttgttgaacaaaatttacattagcaacaaataccagggaatgaaaataatgcacttttgttgataaagtaacagattttgcctggttgtctttggagccgtcatgctctgtgtgtgtttctgcttccagatttctttttttttctctccaacttttattttaggttcaggggtacatatgcaggtttgttacatgaataaattgtgtgtcacaggcgtttgttgtacagattatttcatcacccaggtaataagcgtagtacctgatgggtagttttttgatcctcaccctccttccaccctccatcctcaaatagacctcaatgtctattgttcccttcttggtgtccttgtatactcaatgtttagctcccacttataagtgagaacatgtgatgtttggttttctgttcctacattaatttacttaggataatggccctccagttccatccatattgctgcaaaggacacgatctcattcttttttatggctgcatagtattccatggtgtatatgtactacattttctttattcagtctacagttgatgggcagttaagttggttccacgtcttcactatcgtaactagtaaactgcatgtatttaaagtatataatctgatgagttttgacataggaatccacctgtgaaatcatcaccacaattaaaataatgaatatatctgtcaccccccatagcttttccctgctcctttgaattcaacccatcctataatccatccccaggcaaatactggtctgctttctgtcactataggttggcttccttttttagaattttacataaatgaactcataatatgtactctatttttgtctagattctttcatccagcataattattttgtgattaatctatgttgttgagtgtataaatagtccattcctttttattgctatatagtagtttattgtatggatgtactacaatgtgtctattcattcaaatgttgatggaaatttagattgtttccagtgttgcctgcttcttgttgcatttagcaaaatattataagaaagtgcaaactcaggcaagaaatgaccagattgcaagcagagattgaaggaaatagagtccagagatgtgagtctttacaagattgagaaatgcttttatatttcagataacaggaaatatggctttagttgcttgtgttaggccaaataatgactgtccccccaccaaaatgtccacattctagtccccagaatctgtgaatatgttaccgtacatggcaaaagggactttgcaaatgcaattaaggaccttgagatgaggagatcatcctgaattattccagtgggcccaatttaatcacatgagtcattaaaagcagaagatctttcccagctgcagtaagagagagacatgtgatgatgggacaaagggtcagagagatgtgttatattgctgattttgaaggtggagaaacagggccataagccaaagaatgccagcaacctctagaagctgaaaaaggcaagaacacagattctccctgtgagcctctagaagtaatgtggtcctactgataccttgattttagcttagcgaaactagtgttggttttctgacttacagaactgtaagttcataaatttctattataaatatataatatatattatattatcataaatttatatttatagattatacatttatatttaagcaactaagtttgtggtaatttgttaaatcagtgataaaaaactaataccttcctctaagcttttcccaaaggccttgtattaaggcaaacagaaggacagacgcctaaggaaacaattagattaaaggagttttcttcccactcaaagttgttaccattaaattaagagtgacatgagtcattcaacagagcttagaacaaaagatttcagaatcagacctagaaaagaactttggttgtggtcattgatgcatgaaacaaataaacaagaagcccttttagtttttgaagaaattatattcccaaggaagccataaagcctaacataaaaaagcctgtggttaagcttaaaataactcataggccctcaaattgcaaccacagaagtcaggctgcaaaatctgtacggggcaatcctaagaaatgagtactcctcacttcttcttatattggctatggtagataatggagaagaaagaatcttccagaaagcaaagccagtggtcaggatgacaaacaaaggagttcctcccacagagaggaccagtgatagtcagatggactaagcttggaacttactccattgagagggcaaggataatttaggattcctacccagtaagatttaatcattgctgtgggccaatgattgtgtgtttctgttttttaaataagagtttcttttgccattatcctgttctcacttcaccattgtatattatctgtgtttacgtggtagagagtgataatttagattttattactttatgggtcactgggccatgaggactcaagtgtatatccaatagaaaactgcatgtcacctaaagatcctggattttgagctggatgtcataactggatgagatatttccctagggggtgaggtgagttttttctaaatgtgaaaagtagagtatatgtggattattggtgaccattgctggtctgtgtaatgacttctaactgaccacaaaatccattttccttctctcaaacaaataaagtatagctgagacctggccggaccacatttcctagccctctttgcagttagatgtagccatgtgactagggtcttgacaaaggaatataagttgtgataaatgaaacagtcacctcacagattaaagagaccttgaacttcagcccttcttgaaacccttcatcattggttgaagcaaattgatcttgtaatcacatgttgaagatagaagaacttctaatagcatgcatccctaagtgacttcatagagtacaaccactcaccatcttgataaacctacccaggactgttgagatggaaataaactattttgtttgagtcatctcatttacagttttctccattattacagttttgttttctaccctaacatgcagaataaaatagctataggaagaagtaaatagttttcatgtatccaaatcaacatttaggtagaagatataacagaagaaaagatactatttataatatcaacaaaaagataaaatactctggaatgaacttactttgaaatgtgtgatacctatatgtaacaaacacttaaatactttaaaaacctgaaatatttctcgaatacatacattgatcatcataaagttatcatccctccgggctaatcttaatttaacttgtaaaaaataaaaataccagaggtgttcttttttttttttgagacagagtttcactcttgttgcccaggctggagagcaacggcacaatctcagctcactgcaacctctgtctcccgggctcaagcgattctcctgcctcagcctcctgagtagctgcgattacaggcacacaccaccaccccagctattttttgtattttagtagagatggggtttcaccatgttgaccaagctggtctcgaattcatgacctcaggtgatcctccctcctcagcctcccaaagtgttgggattacaggcgtgagccaccgtgcccagccaggtgttctttttaactagataaactgattcaaagattcatatgaaaaataaagaaagaataccaactaaacctcagacaaggggagcttgagaaaaactggctttgccaaatatgaaaacattctaaagcctcaataacgaaaagaatgtgatgttggtacataaacagacagatcaatgaaaaataaaaggaaatctagaaatagacccaagcatacagtaatttagtggatgataaaaatgggatctcagatcagtggaaaagatagatgaccattcaataaatgcttttgagataactggataactacatgggaaataatatttaaagttgggcacaattccaactgtatagcatgataaactccaaatgggtcaaagttttcaatgaaaaaaaggaaatattcctttctaactttggaggagggctatctaactgtaactccaaatcgtaaaagccataggacagaaaattaataaactgaactacataaaataaaaagcagttccgagtagcagaaaatatcataaaaaatcaaaagacaaatgaaaaacttatagaaatattttcatgcatatcacatccaaagaaatgacctctttagcaattaaaatgcaccttaaaattgagaagaaagagactagcaatctctgaaagaaaaagtaaaaagaattttaacagacaattgttgttgaaattctgtctgctgaaatcctttttccttttttctgtctcgggaactgtgaagaaactcagaaaaggaaacaaaaatagttattaaacacatgaaaaaacacttaaccttgcttttaccagaggaagaagaaaaactacaggagatatcatgtctttcctgtcagattggcaaaaagttaaaagtttggcaacaccctctgttgacaaggctatggagaaacaagcactttgatttattggttataggagtccagtttgggacaaaccttttggaggacaattaggcaatcaatacctttcaaaattgtttgtgaatacagccttaaacctttcaatttcattttttgaaactcattctacagatataattatacacatgcaaaaatattatgtacaagtttattcaatactgcttgccttaacaaaagattggaaaaattcatgcacctatcaatttgagactaactaaacactcacacacacacgaacaatggaatattatgcaatgaaaatctaatcacaacacaggaggtctctgtgtgcttttggtaagatctccaagatatattgtgaagtgagagaatgaggtgaagaacgttgtataacaggctacctctgtgttaaaaaaagagggaatgaagagtcattattatattatcatgaaaaaattggaagatacacaggtaattaacaaaagagattacctctttggggtaaggtgtaaactggacagattgtggacaggattctgagtgagatccttcactgttcagtctcctttgcatcagtaagtgtctcttaaagtaaatggacaagtagaggaatggtgtcagcataatgtggaagctgcattgtgtaatatacaatttcccccatatgttaatgttctgcactgagtaatagcagctgtaccaaaatagcagccaagtcccaaacacgatttaagggagcaagctatgaatacaatgctgtgcacaatgccgttgactccttctccattttactcattttggctacattctctatcctgaagtgcttactaagtagttcccccaattttcatgcactttttctgaactattttgagaatgggaatattaagatgttgccacagttccataacaacttgttgctgagatgtcccttaagagtggggaagaaaaatccattagactttagaataattccacaagagctttctttttctactttaggtgtgattgacatgcatttgtagatgtgttagtgcagattgcacttcatggcacaaggtcctatttggagccataacagcagcttcttaatgaaagaaggaaggtggcaatacagaaaaaaaaaaatcaggtgtttttttttaagcaggtgcaaaacaaacaagcagaaaataaccatccagagctacccatctttgtcatctacattttgtgcaaagcttcaactgcttatcctctatagcttctcatggtgatgtccctccaccttgtctccataaagcagcagcttccatctttccttatccccttgtatctttagttccccctttatttattttattttattttttcattcttttaattgttattttttttgagatggaggctcgctctgtcgcccaggctggagtgcagtcgtgcaatctcggctcactccaacctccgcctcccgggttcaagccatcctcctgcctcagcctcctgggtagctgggactacaggcacgtgccaccatgcctggctaattttttgtatttttagtagagacggggttttaccatcttaggcaggatggtcttgatctcctgatatcgtgatccacccacctcggcctcccaaagtgctgggattacaggcatgagacactgcacctggcctccttttttaaattttttttgagatggagtcttgctctgtcaccaggctggagtgcagtggtgagatctcggctcactgcaacctctgcctcccaggttcaagcgattctcttgcctcagtctcccgagcagctgggactaccggcgcgcaccaccatgcccagctaatttttgtatttttagtagagatgggggtttcaccatcttggccaggatggtctcgatctctggacatagtgatctgcccacctcggcctcccaaagtgctgggattacaggcatgagccacccctcagcctagttccccctttaaaaagtctttcatctatttagagtttaacaagtcttttttttttctctttaaaaactatgctagtatttttattcgaattgttattgctttgttagtgttatgagtatgaagatgaatagattttgagttgcctatcaaaactctgtttttcctacaaacactgttgtttttttgtgaacatttccatatgaattcaaggacctgcttttccatatctgtttaaaaggctgttgaaattttgatagagattaattgagtctgtagatcactttggatattattgacaacttaacaattttaagtctttctacccatcaacacaagcatgtctttccatttatttagatcttcaatttcagcaattttttatagttttcagtgtacattctcacttgagcgtacatcctcacttctccctctccttctcggtctctggtaaccgctattctcctcttcccttctatgagatcagcttttgcagttccacatatgagtgaaatcatgtgccatttgttcttcattgcttggcttacttaatataatgtcctcttggttcattcatgttgttacaaatgacagaatttcattctttttatggctgaaaagtattccattgtgtacatacgccacattttttaaaatctattcattctttgatggccactttggttaatttcatatcttggctattgtgaatagcgctgcagtgaacatgggagtgcatgtatctctttgacgtaccaatttcatttcctttggatatatatccattagtgagattgatggatgatatagtagttctacttttaattttttgagaagcctccttactgttgtctgtaatggcttggataatggggtggctattggtacgtgttcctgaggaataggaagaatgagagagatagtggatttggatgtgtgagtttaaggtgcaagattcaagtggtggttcagtaggccttggtagctccccagagtttgcatctgtaggtagaggtcactgttagtgataaagttgtggtttgatttgtttttcaaaatgtaggtgatacctactgtcatgaaaccaattttgcaggttataaccagcatttttaaaacggactgtaatttaaaaatcagaatatattacaaataataaagaaaaatggtacccaacaaaatgtgtgtgtgtgtgtgtctgtgtgtgcatatgcatgtatattagactgggacatgagtgacttttttactgtgatgtttcaaaacatgtttgaaaaaaattagtttaaaccatgatgaagagatttctcaggcagtgtatgaataacagacctgtggatgaacctagtgcattcttttcttttctcttcttttgtgacggagtctggctctgtcgcccaggctggagtgcagtggcacaatctcggctcactgcaagtccgccccccgggttcacgccattctcctgcctcagcctcccgactacctgggactacaggcgcccgccatcacgcccggctaatttttgtatttttagtagagacggggtttcaccgtgttagccaggatggtctcgacctcctgactttgtgatccgcccgccttggcctcccaaagtgctgggattacaggcgtgagccaccgcgcccggccaaaacctagtggtttctaatatgtagctctcatgttttcagatgagttttaagatacaggcccaaattttgttagttcttattctctacttttgaattatttacaggaaatatattttactgagctgatctactgagaggtgggcacaaatcctttagactttattgaaaaattagttgtccaaaatcttctaggatactcccacttaattacatatatgaggccgggcgcggtggctcacaccggtaatcccagcactttgggaggccaaggcgggcagatcacgagatcaggagatcgaaaccatcctggctaacacggtgaaaccccgtctctactcaaaacacaacaaattagccggacaaggtggccggcgcctgtagtcccacctacttgggaggctgaggaaggagaatggcgtgaacccgggaggtggagcttgcagtgagccgagatagtgccactgcactccagcctgggcgacagaacgagactccgtctcggggaaaaaaaaattacatatatgagcaccctttgaaatgcttacagcagagctagctgcctaaaattaacattcatctaacactgcaagccagaacgtgttctgagtagtgctctggaagggactttggattttgagaaaaaaggttgggagcagtttgaacataaaaactattttctcatgggttccattttgatgttcattaaactcacaacttctttgttttcttcatgtcttcttagaaagtgatttctcactttgaaagtgaactctttgcaggacttgagcatagtgatcacaactgctgcctcccctctgagaaatctggaggatgaggttctccatctgtcttgactacttgagagacccagtgaccattgactgtggtcatgtcttttgctaccactgcatcattcaggtctgtgaatctactaggcaaccattacattgttctctgtgcaagccagcttttaagaaaaaatatctgccatgtgtggcagatggccaacctgatggagaacatttggagaatgaaggtagatgaggagagacaacccagagaggaaagaccacctgagcaaaaagcagagaagctgtgtaggcgacacctggagaagctccattaatgcttcaaaggatgaccagcagatggtgtatgtgatgcgttggagtcccgagaacacaagcaccatgctgctgttctcctagaaaaggctgcacagcctcgtcgggtaagaatcgtgttggaccccagctctgttcttttagccagaaagttctatggtaccttcaggataaggtgcaggttttttgcattactttattgaggtatgattgacatgtaaaagctatacatatttaatgtataccaattaatgagtttgtagatgagtatacacctctgaaaccatcatcacagcaaaaacacgtctatcactttccaaactttccacacaccctctttattgttattattttgtgtgtgtgataagaacacttagccaaagatctattcttttagtaaatttgaagtatacaatacagtgtttttagctataggcattatgctatatagtaggtctctagaacttctttatcttgcataactgaaactttgtaactttgaccatcaaccctccattccccgtccccaccagtccctggcaaccaccattctactctgtttatgtaagtttgactgttttagattccacatataagtgaggtcgcacagtatgtgtctggcatattcacttagcataatgttctcaaggtccatccatgttgttaccaatggcagaatttccttctttttaaggctgaataatattgcattgtatgtatataccacattttctttattcatccatcagtgaacatttagggttttttaaatcttggttattgtgaatagtgctgcaaagaacatgggaagtatatgggctataaatacccagaagtgaaattgctggatcatatggtagttctgtttttaattatttgaggagcttcttactgtttttataatggctgtaccagtttgcatttccaccaacagcgtatcagggttcccctttctccacatcctcaccaacgcttcttatcttttaaaaaaatataatagcatttctaagaggtgtaagacagttcaaattctttagcatgaaagattcttggtaaagtactaccctttgcatttggataataaagctggtttggttttatatcttttatggaagtaagtatatcacattgccttgatggtttcatctctgaggttcagatcaagtcttatcagctatacagaataccagcactcctgatagctctcgtagtatatagcttcaagtggtatgtacacagttgttataaaaatatttttgaggtctggtgcggtggctcacgcctgtaatcccagcacttttggaggccgaggcgggcggatcacagggtcaggagatcgagaccatcctggcacacacagtgaaatcctgtctctactaaaaatacaaaaaattagccgggcgtggtggcgggcgcctgtagtcccagctactcgggaggctgaggcaggagaatggcgtgaacccgggaggcggagcttgcagtgagccgagatcgcgccactgcactccagcctgggcgacagagcgagactccatttcaaaaaaaaaaaaatttttttttcacaatatttcagcctgtataaaatctatgtaatttttctttcagaatttaacaaggaaaatattatttcctctggggtcctagtatgtttcttcttgcctgctaaagaaacatcaggccaggcttggtggctcacatctgtaatcctagcgctttgggaggctaaggcaggtgaatcacttgatgtcagggactcaagaccagcctggccaacatggcaaaacctcatctctaccaaaattcaaaaattagccaggcatggtggcatgcacctgtaatcccagctacttgggaggctgaggcaagagaatcgcttgaacccaggaagcggagcttgcagtgagccaagattgtgccattgcactccagcctgggcagcagtgtgagactttgtctcaaaaaaaaaaaaaaagaaaaagaaaagaaaaaagaaacatcaggcagttcattgtttcccttttctctttgcctgccaatttagtcatcctcttaataatctggagttgctgccaggtgtggtggctcatgcctgtaatcccaacactttgggaagccaaggcaggaggatagcttgagaacaggagaccagcctgggctatagcaagaccccatctctacaataataataataatagttattattattattatttggagttggcatatatactttccttgactttttgtgttaattttttgtttctatttttttttctttttacaagacagggtctcactatgttgccaaggtatgccctcaaagacttgggctcaagagatacttcacccttattttcccaaatagctgggactacaggcacataccactgcacccaccttctatttttgttttattaattttaattttaattgtctgtatttttggtagaaaaggatagtataaatataaattagaaactataccataagtcttgttagttataatgataatacgatattattttgtcttacttctaagaaattgctctaggccattgtatcactcaatggatcttccttattaactagaatggaaattgttccacacaaccattattaaactacacatggtcaaatgcagttggatttcactctggaatcactttgcatctcccttttttcattgaggtcattttcatcttgatcttgagactatccaagtttattttctttttctttttctttttttttcttttcttgagacagagttttgctcttgttgcccaggctggagtgcagtggcgcgatcccgactcactgcaacctccgcctccaaggttcaactgattctcctgcctcagcctcccaagtagttggaattacaggtgctcaccaccatgcccagctaatttttgtattttttagtagagacagggtttcaccatgttggccaggctggtctttaactcctgacctcaggtaatccacctgcctcgacctcccaaagtactgggattacaggcatgagccaccacgcccagcccgagactatccttgtttattttcatagggcaaaattctaaaccatcggaagattctgaagggatacagggatagcattcagaattctcaatctatgggagaagatgagattcaggccctggtggtaagagaggtctctagtaaatgttctgtatgaatgtgtgtatgtgtgtagggcaggggtgtgtgtgtaggtagtagcggggcataggttaaggagaggaaggggtatgtgtgtgggggaagtattgaggaatggggagggggagagtgatcaaagagatttctgttctgaactcatcctcagaagatctcacacatgttctggtgttccctagcctctcaaaaaggtcacttttctctttctgcatttactggagacaacatttcagaaccacaggcaagacattgtatcagtgtttgaatagggccatcggtttttgagagaaagggaacagtacctgttggagcagctggtagggctagagcaagagctcaccaaaaggaggaacagccgtgtcatcaagggttctgaggaggtggtccagcttgggaccctgatcactgagttggagaagtctcggcagccagcacttgaacttttgaaggtaaaggaccaaccaaactgtatctgagtcctcttgctctatgactacggtgtggcctatttgcaagagatttggaccaagagtcaagagagacaaggtgttattctcatttactgaattctttaataactgaattagccaaccaataggttttaagccccaaagtgcagtgggcaggggtctataatatgcacagaccatataatggaatattaagatctgtacatttataattacaacaaataatctgatgttaaatcttccagtcagattggatgccacaagaattctggaaacagctagtgtttagtcagagaagccttcaaagaagaggcttttgatgttggccttgaaggaaacgtaaagatttattttattttatatttatttatttatttgagatggcatctccctctgtcacccaggctggagtgcagtggcgcgatctcaactcactgcaaccttcacctcctgggttcaagtgattctcctgcctcagcctcctgagtagctgggaatacaggcacccatcaccacgcccagctaagtaagatttagattgtcagaaaggagctaaacattccacttggtagggggtggggacacactagttacaattagataaatgaatgtaataataaacttggtatatgtgttggcaggtgggcataggtgctggggaagataggagtaggaagactgataagaaggggacatagaatgaaggtagctacctttctggaagagtcagattaagtgagggagaagtgaaaagtatgatggggccaactgagttgaggccttccaaagcaggctgaaatttgagccttaactgaatagacaatgggattcttaacagatttttatctgtctataaatcaagaaaggtttctgaagaggatagtctagaactcgaatgaaagacatgaaggggaagcatttgtccttataaattgaaactgcaggccgggcacagtggttcacacctgtaatcccagcactttgggaggccaaggcaggcagatcatgaggtcaggagatcgagaccatcctggctaacacagtgaaaccgcgtctctactaaaaaatacaaaaatgaagccgggtgtggtggtgggtgcctgtagtcccagctactccggaggctgagtcaggagaatggcgtgaacccgggaggcggagtttgcagtgagccgagattgtgccactgcactccagcctgggcgacagagccagactccatctcaaaaaaaaaagaaagaaactgcaggttgggagtagtggctcatgcctataatcccagcactgtgggaggctgaggcaggcagataacgaggtcaggagttcgagaccatcctggccaacatagtgaaatcccatctctactaaaaatacaaaaattagccggacatggtggcaggtgcctgtaatctcagctactctggaggctgaggcaggagaatcgcttgaacccgggagacagaggttgcagtgagccaagatcacaccactgcactccagcctgggtgacagagtgagactccatctcaaatgaaaaaaaaataaaaaataaataaaaaaataaaaaaaaaaacaagaaaagaaaagaaaaaaagaaactgcagcagagggaggacaggtccgggtccatcagaataattctctgttcagtcctggtgtatacccatttctcaatgatcccacagtagagaatgatgatggctcctgagaactatttttatgacagtgtctgtgttctgtttttttccaggacccaagtgacataatatgcaggtaagtgctgcttgctttttttcttttaaattttaaccacttatgtctccttattgttttctctgtctatcatcttactgaaatttgacaagtgctggaaagggattgtttagaagggagagaggttattctggttagtgtatgttgaaaggtattctatggaatagaggagggagttctagaaaaaaatattgtcatggaacttacgatggtaatgggctgagaaaaataaaatgagaggagattatagaaaagtattggagaaaatttagaatccatgttcatttctaaaactagtttcctttcattcttccccttcctacatggttcccagcctccactcctggccacagtttctcccatattctgtagagcacatttcattatcagattgtcctctgcctgatagtgaggtttcctgcattctggttgtccatagaaagcaaacacttctatggctcacagggataatgatttcttcctcatgtctttcatttgagttctagactgtcctccgcaggacattcctcagcagtgggtctgaggaatatgttaaacatttaacattgacagttttcaaaatcatacccacatgatacagagaagctttgaacagagaataaagtcaggcattttgataatacacaacttatctgcagagacacccaggactactggcatatactgagcatttcctgtgggcaaaacactgggtagaaaggcgtgtgatgagataggttaccagattatggctggggataccagatagacacatatgagagatgaataatgatataaaaaatgaggttgacacagaatgggtaatacttcttgccttgaagtgttttgtccgctttagcaaaattattccagctttatattgattagtgttcacatggcatttctttttctgtcctttaattctcaaactttctgtgttttttaaaaatgtctcttataagcaacataaattttgttctgttttttaataaatccattctgacaatatgcaatggaatatttagtatttatccatggaaaattactatttcattcacattttcaaaataatttgcatagttgatcaagataatgtgcttagatttactaatttttctttttatatctgaatgttttcatttcttattttgtgtatttctacctttttctttttcttttgagctggagtctcgcactgttgccctggctagagtgcaatggtacaatcttggctcactgcaacctccgcctcctgggttcaagagattctcctgcctcagcctcccaagtagctgggattacaggtgcccgccgccatgcccagctaattattttttgtatttttagtagaaatggggtttcactatgttggccaggctggtctcgaactcctgaccttgtgatctgctcgcctcagcctcccaaagtgctgggattacaggcatgagccaccacgcccgcccccctctttcttttcttttcttttcttttcttttttttttttttaagagacaagggtctccttatgttgcccaggccggactcctgggctcctgggctcaagcgatcctctcacttcagactcccaagtacctgggaatacaggcacatactgccacactcagctgtgtagttctattttatctcttctatttgcctgtcccttttttccctcctacttttatggattgttgagccctgcttttacaaagtaccttaatttctagcatatggtatttttattactgttttctagatattttgaaattttgaatttgattttctatttaacataagatttgtttaagaaagaagctatttgtcagtgatatgctgagtttttttctaataggtctttttgtttcatagttttcaagtcttgtgataagaaaagtttgctatgtctactttttggactttttttgaggctttctaggttatatgttgtaaatttttggacagtttcagacacttgaaaagaaggtgcactttttcttggaatagaataggattttgtatatctctgtaaggttggccttagtaattctgttatctaggtattttgtactaatacttattttctgacttcttgatatgtcatggactaaaagaggtcagtcacagattcctactaacagtgagtttttgcctattttttcttttttttctgagatggagtcttgctctgttgtccaggctggagtgcagcggcacgatcttggctcactgcaacatccacctcccgggttcaagtgattctcctgcctcagcctcccaagtagctgggattataggtgtgcaccaccacacccagctaatttctgtatttttagtagagacagggtttcaccatgttggccaggctggtctcgaactcctgacgtgatctgcccgcctcagcctcccaaagtgctgggattacaggcctgagccaccgtgcccagcctattttttcttatattgatatagtttttgctttttacattttgatgttctttttctacatgacttttaaggaaagttgtatcttaattgtgaattataatcttgttttaaaaaacagagacagagttttaaaaaaccgagactcgctcagtcacccagactagatgcaatggtgcaatcatagttcactataaccttgaactcttgggctcaagctacctctccgcctcagcctcccaagtagctgggactacaggtgcatgtcatcacacctggctaatattaaaataattgttttagaggggttctcactgttactcagtctgatcttgaactcctggcctcaagtgattctcctgccttggactcccaaagtactgggattataggcataagccatagcacttcgcctataatctttaagtaacaaaaaatgttgttgtcttatttaatatttttctctcccaaattcaattctgtccgatagtaagatcaagatatcagaattctttcattttggatttagttaatacacctttgcctaccattatcttaattttaaatttaaaaaaaatgtaaagctttatcttaattttctttttttaatttaatttttaaaatatattttaaggtatacaacatgatgctgtgagtaaaatggttattacagtgaagcaaattaacacctccatcacctcacatagttacctgcttcccttcccactcccaacccctcattgcaagagcagttataatttactcatttagcaaaaatcctgaatacaatacaccatttttattatttttttaatttatttttttgagacaaggtctcactctgtcacccaggctggagtgtagtggcgcgatcttggctcactgcaacctccacctcccaggctcaagagatcctctcacctgagccttgcgagtagctgggactacaggcacgggcaccacatttggctaatttttgtagagacagggtttcaccatgctgctcaggctggtctcgaactccttggccttaagtgatctgcccacctcggcctcccaaagtgctgggataacaggcgtgagccgtcatgcctggcctacaatgccctgatattagctatagttggcaggttgggcattagatctccagacctgttcatcctacatatttcctactttgtatcccttgaggtacatctccccatttcttccacccaccctacctctggtaatcactattttattctctatttctgtatatttgactttttaaaaaattctacatatatgtaaaataatgcaatagttttcattttgtatctggcaagttttatcttaattttcatttaatctgatatatatccccaaataattcctttagaggttgtaacagcgaggaaggagccaagatggccgaataggaacagctccggtctacagctcccagcgtgagcaatgcagaagatgggtgatttctgcatttccgtctgagctttgaagagagcagtggttctcccagcacgcagctggagatctgagaacgggcagactgcctcctcaagtgggtccctgacccctgacccccaagcagcctaactgggaggcactacccagcaggggcagactgaaacctcacacggccgggtactccaacagacctgcagctgagggtcctgtctgttagaaggaaaactaacaaacagaaaggacatccacaccaaaaacccatctgtacatcaccatcatcaaagaccaaaagtagataaaaccacaaagatggggaaaaaacagagcagaaaaactggaaaatctaaaaagcagagcgcctctcctcctccaaaggaatgcagttcctcaccagcaacggaacaaacctggacggagaatgactttgacgagctgagagaagaaggcttcagacgatcaaattactccgaactatgggaggacattcaaacgaaaggcaaagaagttgaaaacttcgaaaaaaatttagaagaatgcataactagaataaccaatacagagaagtgcttaaaggagctgatggagctgaaaaccaaggctcgagaactacgtgaagaatgcagaagcctcaggagccgatgcgatcaactggaagaaagggtatcagcgatggaagatgaaatgaatgaaatgaagcgagaagggaagtttagagaaaaaagaataaaaagaaacgagcaaagcctccaagaaatatgggactatgtgaaaagaccaaatctacgtctgattggtgtacctgaaagtgacggggagaatggaaacaagctggaaaacactctgcaggatattatccaggagaacttccccagtctagcaaggcaggccaacattcagattgaggaaatacagagaacgccacaaagatactcctcgagaagagcaactccaagacacataattgtcagattcaccaaagttgaaatgaaggaaaaaatgttaagggcagccagagagaaaggtcgggttaccctcaaagggaagccgatcagactaacagcggatctctcggcagaaactctacaagccagaagagggtgggggccaatattcaacattcttaaagaaaagaattttcaacccagaatttcatatccagccaaactaagcttcataagtgaaggagaaataaaatcctttagagacaagcaaacgctgagagattttgtcaccaccaggcctgccctaaaagagctcctgaaggaagcactaaatatggaaaggaacaaccagtaccagccgctgcaaaatcatgccaaaatgtaaagaccatcgagactaggaagaaactgcatcaactaacgagcaaaataaccagctaacatcataatgacaggatcaaattcacacataacaatattaactttaaatgtaaatggactaaatgctccaattaaaagacacagactggcaaattggatcaagagtcaagactcatcagtatgctgtattcaggaaacccatctcacgggcagagacacacataggctcaaaataaaaggatggaggaagatctaccaagccaatggaaaacaaaaaaaggcaggggttgcaatcccagtctctgataaaacagactttaaaccaacaaagatcaaaagagacaaagaaggccattacataatggtaaagggatcaattcaacaagaagagctaactatcctaaatatatatgaacccaatacaggagcacccagattcataaagcaagtcctgagtgacctacaaagagacttagactcccacacattaataatgggagactttaacaccccactgtcaacattagacagatcaacaagacagaaagtcaacaaggatacccaggaattgaactcagctctgcaccaagcggacctaatagacatctacagaactctccaccccaaatcaacagaatatacatttttttcagcaccacaccacacctattccaaaattgaccacatagttggaagtaaagctctcctagcaaatgtaaaagaacagaaattataacaaactatctctcagaccacagtgcaatcaaactagaactcaggattaagaatctcactcagaaccactcaactacatggaaactgaacaacctgctcctgaatgactacttggtacataacgaaatgaaggcagaaataaagatgttctttgaaaccaacaagaacaaagacacaacataccagaatctctgggacacattcaaagcagtgtgtagagggaaatttatagcactaaatgcccacaagagaaagcaggaaagatccaaaattgacaccctaacatcacaattaaaggaactagaaaagcaagagcaaacacattcaaaagctagcagaaggcaagaaataactaaaatcagagcagaactgaaggaaatagagacacaaaaaaacccttcaaaaaattaatgaatccaggagctggttttttgaaaggatcaacaaaattgatagaccgctagcaagactaataaagaaaaaaagagagaagaatcaaatagacgcaataaaaaatgataaaggggatatcaccaccgatcccacagaaatacaaactagtatcagagaatactacaaacacctctacgcaaataaactagaaaatctagaagaaatggataaattcctggacacatacactgtcccaagactaaaccaggaagaagttgaatctctgaatagaccaataacaggatctgaaattgtggcaataatcaatagcttaccaaccaaaagagtccaggaccagatggattcacagccgaattctaccagaggtacaaggaggaactggtaccattccttctgaaactattccaatcaatagaaaaagagggaatcctccctaactcattttatgaggccagtatcatcctgataccaaagcctggcagagacacaacaaaaaaaagaattttagaccaatatccctgatgaacatcgacacaaaaatcctcaataaaatactggcaaaccgaatccagcagcacatcaaaaagcttatccaccatgatcaggtgggcttcatccctgggatgcaaggctggctcaacatacgcgaatcaataaacataatccagcatataaacagaaccaaagacaaaaaccacatgattatctcaatagatgtagaaaaggcctttgacaaaattcaacagcccttcatgctaaaaactctcaataaattaggtattgatgggacgtatctcaaaataataagagctatttatgacaaacccgcagccaatatcatactgaatgggcaaaaactggaagcattccctttgaaaacgggcacaagacagggatgccctctctcaccactcctattcaacatagtgttggaagttctggccagggcaatcaggcaggagaaggaaataaagggtattcaattaggaaaagaggaagtcagattgtctctgtttgcagatggcatgattgtatacctagaaaaccccgttgtctcagcccaaaatctccttaagctgctaagcaacttcggcaaagtctcaggatacaaaatcaatgtgcaaaaatcacaagcattctcatacaccaataaaagacagagagccaaatcatgagtgaactcattcacaattgtttcaaagagaaaaaaacacctaggaatccaacttacaagggatgtgaaggacttcttcaaggagaactacaaaccactgctcaacgaaataaaaaaggatacaaacaaatggaagaacattccatgctcatgggtaggaagaatcaatatcgtgaaaatggccatactgcccaagctaatttatagattcaatgccatccccatcaagctaccaatgactttcttcatagaactggaaaaaactactttaaagttcatatggaaccaaaaaagagcctgcatcgccaagtcaatcctaagccaaaagaacaaagctggaggcatcacgctacctgacttcaaactatgctacaaggctacagtaaccaaaacagcattgtactggtaccaaaacagagatatagaccaatggaacagaattgagccctcagaaataataccacacatctacaaccatctgatctttgacaaacctgacaaaaacaagaaatgaggaaaggattccctatttaataaatggtgctgggaaaactggctagccatatgtagaaagctgaaactggatcccttccttacaccttatacaaaaattaattcaagacggattaaagacttaaatgttagacctgaaaccataaaaaccctagaagaaaacctaggcaataccattcaggacattggcatgggcaaggacttcatgactaaaacaccaaaagcaatggcaacaaaagccaaaattgacaaatgggatctaattaaactgaagagcttctgcacagcaaaagaaactaccatcagagtgaacaggcaacctacagaatgggagaaaattttttcaatctactcatctgacaaagggctaatatccagaatctacaaggaactcaaacaaatttacaagaaaaaacaaacaaccccatcaacaaatgggcaaagatatgaacaggcacttctcaaaagaagacatttatgcagccaacagacacatgaaaacatgctcatcatcactggccatcagagaaaaggaaatcaaaaccacaatgagataccatctcacaccagttagaatcatgatcattaaaaagtcaggaaacaacaggtgctggagaggatgtggagaaataggaacacttacactgttggtgggactgtaaactagttcaaacattgtggaagacagtgtggcgattcctcagggatctagaactaggaataccatatgacccagccatcccattactgggtatatacccaaaggattataagtcatgctgctataaagacacatgcacacgtatgtttattgtggcgctattcacaatagcaaagacttggaaccgacccaaatgtccatcaatgatagactggatcaagaaaatgtggcacatatacaccatggaatactacgcagccataaaaaaggatgagttcatgtcctttgtagggacacagatgaagctggaaaccattattctcagcaaactatcccaaggacaaaaaaccaaacaacgcatggtctcactcacaggtgggaattgaacaatgagaacacctggacacaggaaggggaatatcacacaccggggcctgttgtggggtggggggagggcggagggatagcactaggagatatacctcatgtaaatgacgagttaatgtttgcagcacaccaacatggcacatgtatacatatgtaacaaacctgcacattgtgcacatgtaccctagaacttaaagtataataaaaatatatagacattaaaaaaaataacttaaaaaaaagaaatctgtaacaataagatgatcctgtgggactgaatgcttttgtcatccttaaactcataattgaaacctaatctctaatgtgatggtgtttggaggtggagccattaggaagtgatcatgcaatgaaggcaaaaccctcattaatgaaatgaatgcccttataaaagggaccccagagagctccttgccccttccaccatgtgaggacaccaaggaaaagcaacatccatgaatcaggaagcagcccttaccatacatggactcttcccaggccttgatctttgactttccagcctccagaattgtgagaaatagatttctgttgtttgcaagccacatagtctatggtattcttttataactgcccagattgactaagacagatgatgatgaaaatactaccaagtattggaaattaacatcaaaattctaaatgacaatttattcaaagaggaaatctagagaaattagaaagtcttctgtattctgaaggataatgaaacatacatatcaaatgtatgggatgcagctgaagtagtactagagaaaaaaccaatacccttaaatgcctatattaagaaagaaggtaggtctcaaattagtaaattagcttctgctataagaaacaaagaaaaacaaattaaaccaaagcatggagaaggaagaaaataataattaaatggaaaaaatgaagcagaaagacagagaaaattaatgaacccaaatattggttctacggggaaaaatcagtacactttataaatttctagctagactgatcaagacaaaaagatgcacattaacaatgtcaagaaaaaacgaacatcagtgcacactctctagatctcaaaaagaaatattgataatctcatgtcaataagtttgacaagcaaatgaaatgaacaatttccttgagagagaaaacttatgaaaactgacctgagaagagatagaaaatgtggccagtcatatattgattgtagaaattgaatgtgtaatcaaaatccttctcatataggaaactccaggtccagaaggcttcattgatgaaatgtatctaacaaataatttggaaataacatcaattttacacataccttttagaaattaaaggaggcaacaactttcaatttaatctatgcagccagctttcacagtcaggcgtgagtatctggcttttccaggtgcacagtgcaagctgttggtcaatctaccattctgagatttggagcaccgtggccctcttctcacagctccactgggcagtgccctaataggaactctgtgtgggggctccagccccctatttcccctccacactgccctagcagaggttctccgtgagggccctgcccctgcagcaaacttttgcctgggcatcttagcatttccatacatcttctgaaatctaggtggaggttcccaaacctccattcttgacttctgtgcacctgcaggctcaaaaccatgtggaagctgtcaaggcttaaagcttgcaccctctggagccatgggccaagctgtaccaagcttggccccttttagcagccgtgggagcagttgggacccagggcaccaagtccctaagctgcacacagcatgggaaccctgggcctggaccaggagaccattttttcctcctgtgcttctgggtctgtgatgggaggggctgccatgaagacctatggcatgccctggagacattttccccattgtcttgggggatcaacatttggctctttgttacttacgcaaatttctgcagccagcttgagtttctcctcaaaaaaattggtttttctttctattgcatcgtcaggctgtaaattttctgaacttttatcctctgtttcccttttaaaatggaatgcttttaacagcacccaagtcacattttaaatgctttgctgcttagaaattttatctgccagataccctaaatcatctctctcaagttcagagtgccacagatctctagggcaggggcaaaatgccaccagtctctttgctaaaacgtaacaagagtcacctttgctccagttcccaacaagttcctcatctccatctgagaccacctcagcctggaccttattgttcatatcaccatcagcatttttgtcaaaggcattcaacaagtctttaggaggttccaaactttcccacatttttctgtcttgttctgagccctccaaactgttccaacctctgcctaatacccagttccaaagtcaattccacattttcgggtgtcttttcagtagcacccactctactggtactaatttactgtattagtgcgttttcatgctgctcataaagaaatacccaagactgagatgaaaaagaggtttaactggacttagaattccacatggttggggaggcctcagaatcatggcgggaggtgaaaggcacttcttacatggcggtaacaagagaaaatgaggaagatgcaaaagcagaaacccctgataaaaccatcagatctcatgagacttattcactaccacgagaacagtatgggggaaaccaaccccatgattcaaattatctcccactgggtcccctgggtccctcccacaacacatgggaattatgggagtacaattcaagataatatttgggtggggacatagagccaaaccatatcaccagcattacccaaataaaaatcccagacaagaacatcacaagaaaaagaatcaagaacaaatattcctcttgaacacagactcacaattcaatacaaaacgttatccaattaagatatacataaaatgaataatatgccatgccatattggtttttttaaagggaaagtaaggttggtttaacatctgaaaattaaacaatacaattcacccaattaatagaacaaagaacaaatgttgcacaattattatagtcaatgcagaaaaagcacttgcaaaatcaagaccatttcatgacaaaatagctcagcaaacaaaatcgaaaggaatatcttcaatgtggttaaggacacccacgaaaagtttacagctaccctcatattcaattatgaaaggccagatgcttacttcctaagattagcaacaaagcaaagatgtggctctcctcatttttgtttaaaacaccttacgagcatcctaactagtgcaatatggcaagaaaatgaaataaaagaccaataaaagggccaagtgtggtgcctcatgcctgtaatctcagcactttgggaggccaaggtgggaggatcactttagttcaagagtttgagactagcttgagcaacatagttagacccctgtctttactaaatataaataatttttaaaagaaaaaaaacaatagataggaaaggaagaaataaaatctttctttctcagcttaattacatatgtagaaaacaataaggaattctgaaaaagtctctggaagtaataattaaatttgcaaaattgttcacaaaagatatgtaataagtctcttagacaaacatgacaagatagcaacaatactagtcatcaaagaagtgcaagttaaaaccacaatgagaaaccatcacacatcacctagaataagtaaagttcaaaagacatatgataattctaaatactggtatgaatatggaaaaaataaaaatctcttatattgttggtaggaacgcaaaaaaaagttgcagtcagtttgtaaaataatatggcaatttcttaaacagctacctatccatttaccatatcacccaacaattccacaaatatttatttatccaaaggaaatgaaaatttaaggccatgcaaagacttgtagtcagttatttatagtggtttcattaattacagaccctaaccggaaataacccacgtttatcagctggagaatagagaaaccaacgaataaactggaattccaacaatactcagcagctactcagtgacaaaaatgaatgaaatattattactcttaactacatggaaaaatctcaaatattgttatgacaagtgagagaccaaaggactacataacatatgattgcatgtccatgaaattctagaaatttcattattacagtaacagaaagcacagcagtggttgagtgaagagaagggggtgagggtgggaggcaaggattaaatagaaaaggggcataaggaaagtttttagggaaaagaaactgtcctctatctgggcaatgtggtagttacatgactataaataattaccaatattcataaaacattgtagctaaaactggtgagttttattatacacaaacgccccaattaggaaaaaaaaaggtgggggaagaaggcaaaaatgaagacacttttacataatccaaatcagaaaattcatttcctagggatcttgtactacgtataattttgaaggaagttcttcaggctgaagggaaatgatactagatggtgacctagatatatagaaagggataattaacaacagaaattatgcacatacacagatcacatacacactcattttcttaatgacaatatgaatgcttaaaacaaaaagtattactgtattattgagtttataaagtatattgatgtaatatatacaacaagaatagcacaatggtaggttacatgaaactacactcttacaagtgtcctttattttgctggatgcagcttaatattacctgaacttcaccatgaaaagtcaaggaatcgggtttcaattcttacaacaataaaaaattagtgtaaagaaatatacctaaaagccactagaattaaaaccataaactaaaaaatgtttacttaacacataagaaagtaggaaaggaggaatagaaacaaaaagatacgagacaaattgaaaacatacagcaaaatggtagaccaaaacccaaccattgtaagtgaagaaatgacacgacctgagtcacattagcagaactgctgagcactgtggggagaacagacatgggcaggaagtgagggacagtgttagtgccacaattcaggggtgagagggtggcagggactaaggggaggggagggtgtgagggatgagaggggcagagagaagggctggagagacaggaagtgaggaaaaggagcaagggaaaggactctaaagcagtggaggagcctagcagggggttcttgacatgcattcggtatttaatacattttgtgggactgccaaaaactaatggcctcctcatgattaaaaacataagagtaaaaaaataccaagtatgcaaataaaatgtgcacactgcttagatgtgcataattcataaaaacaagcagtgcttaagcattgatgataggcattttgacttcagtgcaattttgaggctccttgttacaatatacagtaacaaatcctgcttctttgtattgagatgtcctggactcacacagggaaactcgggctatggaatgaagataattttaaatgcaacaacccagagtcatggatccacagtctgggaaagtaaacttagaagctttgtgactcgaattgcaatgctgtttggatacacttatatatgaagcaggcaaaatcaggtcttttacagattagaatcctgatcattcaggggttagattgtgctaaccactgtattaataaacaaacaaacaaaaaaacctggtcactatgagaatctctatcttgtgccttcagccacaacttcaccaggtttaaagagaaaacccctttctctacaccgccattcccaaggcgagctcactctctggcatcaaagttccctggggtgagttttcttctaggatagtccaaggggagaggtaaggagtcggaagtccagttcagggacgaggattccaggatgagcgtgaatgggaaggggctgggcccagcctgggggttctctccctagtttccacagacagatccttgaccaggactcaggcagtcagtgtgacaaagaggctggcgtaggaaaagagaggtcaggacaaagtcccaggccccaggcgtggctctctgggtctcaggccccaagagcgatgactgcactggggagtcacagggttggggattgcccactcccctgagttttggttctcccaaccttcttcctggatacttgtgacataatcccacttctcactcccattgggtgccgggtttttagagaagccaatcagcttcgccgcgatcccggcactaagatcccggcactacagtcccggcgcaaccacccgcactcagattctccccaaacgccaaggatgggggtcatggctccccgaaccctcctcctgctgctcttgggggccctggccctgaccgagacctgggccggtgagtgcggggtcgggagggaaagggcctctgcggggagaagcgagtggcccgcccggcccggggagccgcgccgggaggagggtcgggcgggtctcagcctctcctcgcctccaggctcccactccttgaggtatttcagcaccgcagtgtcccagcccggccgcggggagccccggttcatcgccgtgggctacgtggacgacacagagttcgtgcggttcgacagcgactccgtgagtccgaggatggagcggcgggcgccgtgggtggagcaggaggggctggagtattgggaccaggagacacggaacgccaagggccacgcgcagatttaccgagtgaacctgcggaccctgctccgctattacaaccagagcgaggccggtgagtgaccctggcccggggcgcaggtcacgatccctccccatcccccacggacagcccaggtcccgggtctgagtctccggtctgagatccaccccgaggctgcgggacctgcccagaccctcgaccagggaagaaactcgggcgcctttacccggtttaatttcagtttaggccaaaatccccgcgggttggtcggggcgggagcggggctcggtgttcggggctgacggcgggggcgaggccatggttctcacaccatccagaggaagcatggctgcgacgtgggcccgacaggcgcctcctccgcaggtatgaacagttcgcctacgatggcaaggattacatcgccctgaacgaggacctgcactcctggaccgccgcgaacacagcggctcagatctcccagcacaagtgggaagcggacaaatactcagagcaggtcagggcctacctgagggcaagtgcatggagtggctccgcagacacctggagaacgggaaggagacgctgcagcacgcgggtaccaggggccacgggggcgcctccctcatttcctgtagatttcccgggctggcctcccaccaggagagtaggaaaatgggaccaatgctagaatatcgccctcccactggtcctgaatgggaagaatcctgggtttccagatcctgtaccagagagtaactctgagagcccaccctgctctctgggacaattaagggatgaagtccctgaggaaatggaggagaagacagtccctggaatactgatccgtggtcccctttgacccctgcagcagcctggggcaccaggaattttcctctcaggccttgttctctccctcacactcagtgtgtccgtggctccgattccagctcttctgagtgccttggcctccactcaggtcaggaccagaagtccctgctcccccatcagagactcgaactttccaaggaataggagattatcccagattcctgtgtccaggctggtgtctgggttctgtgctcccttccccatcccaggtgtcctgtccattctcaggatggtcacatgtatgctgctggagtgtcctatgaggaatgcaaagtgcctgaattttctgactcttcccctcagatcccccaaaggcacatgtgacccagcaccccatctctgaccatgaggccaccctgaggtgctgggccctgggcctctaccctgcggagatcacactgacctggcagcaggatggggaggaccagacccaggacacggagcttgtggagaccaggcctgcaggggacggaaccttccagaagtgggtggctgtagtggtgccttccggagaggagcagagatacatgtgccatgtgcagcatgaggggctgccagagcccctcaccctgagatggggtaaggaggggtgtaagttgtctcctctcagggaaagcaggagaccttcagcagggcagggctgaggcctgggggtcagaacccctcacctccctctcctttcccagagccgtcttctcagcccaccatccccatcgtgggcatcgttgctggcctgtttctccttggagctgtggtcactggagctgtggttgctgctgcgatgtggaggaagaaaagctcaggtagggaaggggtgagaggtggggtctgggttttcttgttccactgtgggtttcaagccacaggtagaattgtgacttgcttcatcactgggaagcaccgtcgacacacaggccgacctagcctggggccctgtgtgccaacacttgctcttttgtgaagcacatgtgaaaacgaaggacaaatttatcaccttgatgattgtggtgatggggacctcccagcagtcacaggtcacaagggaagatccctactgaggacagacctcaggagggcagttggtccagtcaccacacctgctttcctcatgtttcctgatcctgccctgggtctgcagtcacagttctggaaattttcctggggtccaggatttgctgtttccttaaggacctcatgccccatgtcctccctgacctctcacaggttgtttttttctcacagatagaacaaggaggagctatgctcgggctgcctgttagtatgggggattagagggctgctccctgagatcgttgggacagtgtagacaagattcctcctttagccacatctcctgtgggctctgaccagttcctatttttgttctaccccaggcagcaattgtgctcagtactctgatgcatctcatgatacttgtaaaggtgagacatgggggggcctgaagtgggtgggggtgaggcagaggggacatgattctgttgaggggttctctggatttagacatcttgaccatgtggtaggctgttcagagtgtcaccaggtacagtgactgccctggatttgtttatgattattttctcctgtagcttgagacaactgccttgagtgggactgagagatacaaaatttcttcaggtccttcctctgacacacaccattgtaatttcaagagctcctgacttctatatctgcacttgacacgtgaatatatctatgtgtctgtgttccagttagcataatgtgaggaaatgggctactggtccaccactgccaccaggaccaccaccccacactaacctgtcctctcttccccggtcaagttttttttcaacagaggtgaggctgggacatttctattcatgtcttaacttttaagtttcactgagctgccacttactccactattcaaaataagaacctggatatgaatttttcaaattcttgccatgaggttgggttgattgttcaatgaaaggagagcaagactcttaaaacttgagagaggaagtaaaacctgagagccttccagaatccatttttgctgtgctgggcctgttgtaggtggagacaggagagagagggctgtgaggagctgagtgtggacagcctatgctcagttcatcatggaatttgacgtggtcattcattgggttggtcatcttcactgctccattgtttgtgtcccttcagtagaaccttgtttcaccaggacctgtgatcacaggcacacaaacattgcctgggccttgtcctgtctctaggaccgtggacagcaagggcttcatgggctgggtcagtctatggtctggccctaatattttgtatcattatttttggtttctttgtttctgtagaggactatgcctgttcctgttctggtgtctgcgttctgatctctttctcccctgggtgtccctcatctctgacagcagcaggagtcatttttcctgtcattaaccccacaaggtggaaggcagcccctgcacacagaagtctgtggtattaagagatgaattttcaagcccgtgcagcttttaccctatttccagggctctttcttggattgtattttctatcttttccccaacctttttaaaggaactagattctgaaattagcagagaagagggatgccacaagttctcatcttaggtaactttctagtggaactcctcttctgctcagctctcctacccactctcccttccctgagttgtagtaatcctagcactggctctaatgcaaactcatggatctataaagcaaagtctaacttagatttatatttgtttggaaattgggattcatagtcaaagattgttctttcctaagagggaaatataattgcatgctgcagtgtgcagagggttggtgtgaaggagggatgcagggaggaagggagggaggacacacaagcagcactgctgggaaaagcacaggcggcctggatgtcagtgtgaggggaccttgtgctgtcgttgctgcaaaaccgcatttggcctgaggctatgttaataaagatactgcctttagaataggaggtgctctacagtgatgattcattcagccgacatttgctgtctgccagacatatgacagaatgtttttgcatctggggaaagtcattgaagtaaaatcagaaaaatctctagccttgtggagcatgtgttccagtgggaagaggcagacggtacatacactctaatatatgcagagtaaatgaggaaagtgttagaaggtgataagtgctgtggaacaggtgatcagagtatgggttgtgggacagagaaggtagctattgtgccggggttgtcagcgtgggccttgttgggaaggtgacctttgatgaaatatttgaaggacataaaggaatttgtcatgagggtatctggaagaagttttttctagggagtaggaaccttcagtgtcagtgtaccagggcaggatcatgtctgtgtgttctgggaagaacacgggatcgggtatggctagagcagagagtcactgagataaggtcaggggtttggtcagatcatgtgggcatagggctcaagtatgtgggaaggattttgattttgaatgagatagttttaagcagaataaagacatgccacaacttctcttttaaaaggatcactgtagctgctctgctgagaacagaatccaaaggccggcgatgagcaaggcaggtgggaaaactgtaggaaatgagtgcagtatttcaggctggagatgtcggttacttcaactggggtgtgagcagtggaaatagtgggacgtgattggattcctactatttccaatcactttataccgcattttctaatggactaaatctggggtatgagaaagaagagtaaaggataccaaaaatgtcagactgtgactaaaaagagttgccatcagctgagaatgagaagactagcaggagcatatgagaggaggggacgtcgcaggcagtcactatgggagacgtgggatctgagatgccgctgagaaataccagtgaggtagtcgggttggcagttggacagatgaatctggagacatttaggagaaatagacttgggaggtgatgtcatataacagttatttaaagccttgagtctgaatgacgtctccaagggagtgattggctgtagaagagaacaggaacaaggactgaacactaggcctctgttgctaaaggatctgatcagacaacacacctagatcagactgcacagtcctgaccccacatctagaaggtacatagaccagggagttctagactttcctgtggacaggaatcacctggacatcaccttaagtctaagctgatctggaatcgagaatgagatttcctacttatataatgttgctgttggcgctgatgctgctggtcttcagatcccacttttggtagcaagaacacagaccaggattcctaggctatgcatcagcctcgcctgtgaggcttgttaataagcaattcctgcactccatgcgcaacattctgacacaggggcatctgtggagaggcctgagtattctacaacaagcccacagcaaacctggtgctcagccagatttgatatcactgagatcagtagttggagaatgcccaggatggggaggggtctcagacccacatttaagtgttgctttattctgggttttttatttatttatttatttatttttaaggaggatgtgtttctttaattataagacaggatgctgagagataaatgtcattttctctatcatggggtatagccagatggaagattgagaagtggctcacagctcagcagaatgaaaaaatatctgaatgctgctttctgaaactactctccagaatgatttcacactcactccttggagcaaacaatgacttgcaaatttttctaatttaaacataaaggagtgtacatattggtattagtattcattttattttggggaagggcactgtattagtccatagtccgttttcacactgccgataaagacatacccaacattgggaagaaaaagaggtttaattggacttacagttccatttggctggggaggcctcagaatcatggtgggaggcgaaaggcacttcttacatggtggtggcaagagaaaatgaggaagaagcaaatgccaaaacccctgataaacacattggatctcaggagacttattcattatcatgagaatagcatgggaaagactggcccccatgattcaattacctccccctgggtccctcccacaacatgtgggaattctgggagatacaattcaagttgagatttgggtggggacacagccaaaccacattggacacagaaccaggtttgaagctacacagccaggaacataatccacagccaccctaattcagatctctcataggaaccactgtccctgctcctgagcacagatgctactgcatatacctctgataccctgatggccgacactgggccctgtggcaaagactgctatcactgctgctcctgagaactgctccactactgctcctcagccatctttaccaaaatgcagtatttactgtcccagcctctctgtgtcatctcatcctgattagaagcccacatgtggttatctaaattgtgcagccaaagcctcttgcagtgtttaactgcaataatgttggggaaagtgaatttttctcctttgtagaaggaggtagtccctgccttctaataagactcttcaacataggaagagaattcagttgctggaggtagaggggtgagggatggaaaaagaatgacaaatttcaattcctagaatcatgttctgagactagaactttatctagtacattgcaggcacctgggtttggttgagtgtataataaatgacatagttcaacttattcccttgacagtttgttttggggtccagcttttgtctaccccagttttcacacacagatacgtggagaagcattgtgtgatggtaaaatgtttacttgaaagcctttttccctatctttgtctcttgctaggattaaaaacccgtatctgtaagacatcagaggatccatgtatacactgacattttatataaatttttaatattttgttctatctgcacatgctcctagggagagttatctatacattcaccagttttaatgtgactgctcacagaagcctaaaaaaccatcctaatttagatgccattttactcaaactattgtatgaacagctgataaccatactgtttttagaagacccagtgacatggtataaatgctcatcttttgcttgactgttactagtctgggatgagataaagtagaggtttacttgcatagttcactcacaatttctatatgtatagtattgtgggctgctaacaaacagtccacagaccagtgctagcccacagactgcactttgagagtagcattggtctagatgtacttgtattccagcatctacctcggtgtcagattaatggcaggaattaatcagtagcgaatggggattccatttccggtaatagggtgaactaggttttaaagctgcctcttctaccaaaaacaactaaaaaagagatgaaatgtgaaaatcacccaaaagtatagaaatataaaaaagggaataatctttttggtcaaaatataaatgtgggcaggatttagaaaaagggaagttgcttttatcttgagggcgtttgccaaatctggaaaaatcttagctttggttttctcagcttcatatggtatagtgcaaaggaggtaattctcagaacttgtttgtatagggagtataagaggagacacttttgtgtaccccatgaaatatgggaaacaaaagatgtgtttcctcagagtaagaaaagaaaatctgtttcatcccccagcacaagagtattctaaagaaatttgcctttgagtcagcaaaacctgtttttgagaatttacaaccaccagccagcactcctgcagatttgttgcccaaactagctttaccgttttgggccaaaataacctcaaagcatgattttgattaataattgtcctggattagcgatgatccaaaaattggaagaaggaaacaaaaatctttataggaatgcatatttaacccatatgtcaaagaatttgcccaaataattctacaaggaaaaagctgctcagagcatgaactgtataaagtacaagtggagaaaagtcagtctgattgagaaccagtggaaacaatagataagaggctcataaagcttcaatatttgaattatgaaacaaaataacgtaactagtattacatttaaaataattatgagctgggcacggtggctcatgcctgttatcccagcactttgggaggctgaggcaggcggatcacctgaggctgggagtttgagaccagcctgaccaacatagaaaaaccccgtctctactaaaaatagaaaattagctgggcgtggtggcacatgcctgtaatccccgctacatgggaggctgaggcaggtgaatcacttgaaactgggaagtgggcattgtggtaagccgagattgtgccactgcactccagcctgggcaacaagatcaaaactctgtatcaaaataataataataataataataataataataatgacaagcttgaaaatgcctacagaatgtattaacctaaaaatgacctgtttttcaaaagaactaaagttagtttttaggaagtaaaattaactttgattttaaaatttttaacttagttgaattaaaaattgaaaagtcatgatctattgacttttgctttggattatgatggaataacaaggaccagatttactctcatgccttaagcacaacaaactcaaaataatatatgaaaaaatagctatgtactcagatactagacagcaggtatcccagagactgtgatctctgggagaaggggaatggaaaaggtaaggtctacagttgtccagcttccttcctggacagagtttccaaggcagagtgcagagaggcagagccctaaccaggaggttcactgaggtgaggggacagagttgtgaacttggagattccaggacatccagaatatgcaaagatgaaggcacatagaaaagacagctgatgataaaaagcactgtaagtctgcaggaggtacccctcaaattttcagttaatcagcatattatataagggaactacccaaagacagggaaagaattatccgaaaggacttcagagaatagtacccagtgatatacagggctggaaataatgcctgttcccactagccagactggaaaacctcataatttgctgagcattggatagagtattctgaagggtcttatgtcagcagtggtaaataattagccctggactaaacactttttgtttttttgctaaaagatattaaaagacttaaaatgatcaaacagctcctgaataacttaatttgtcccagtaaaaataaaaagctcagccgggcacggtggctcatgcctgtaatcctagcactttgggaggccaaggtgggcagatcacctgaggttgggagttcgagaccagcctgaccaacatggagaaatcccgtctctactaaaaatacaaaattagctgggcatggtggcgcatgcctataatcccagctactcgggaggctgagacaggagaattgcttgaacccaggaggcagaggttgcagtgagccaagttctcaccattgcactccaggcaacaagagggaaactctgtctcaaaataataataataataataaagctcatgaatacttatagaatgcaaaaatatctggcacctaacctggtaaagtcatgtctggcattaaataaaaacaatcaccaggcatataataaaaacaagaaaatacaactcagaaggcagagaaaaccatcagtctaaagttacctagaactgacatagatgtcagaattagcaggcaataacataaaacggttattgtaaatgtattccatatgttcaaaaagttacacagagacatgaaagatacataaaacatcaaaatcaaacttccaaagatgaaaatgtcagacataaaatacactggatgtgaggtgagattaatggtaaactttatgctgtagattaaacagtgactttgaagacatagaaatagaaactttctgggccaggtgcggtggctcaagcctataatcctagcactttgggaggcttagatatagaaggaatgtatcttaccaggataaaggctatgacaaactcacaactaacatcatactcaatggcgaaagttgcatacttttcctgtaagatcaggaacaagacaatgatgcccactctggccacatctattcaacattgtactgataattctaggcagagtaattagggaagaaaaagaaaagggatctaaactggaaaaaaagaagtcaaattgcctctgtttgtagatcacaagatcttatatatggaaaccccaaacactccaccaaaatactactggcactgaaaaaaaaaatcagtgaagttgcagcatacaaaatcagcatacaaaaattagtggtacttttatatacttaccaaaaactgtctgaaaaagaaatcaagaaaataatctcagttataacagtatcaaaaagaataaattaggaataaatttgatcaaggagctgaaagatctgcacactgaaagccataacagtgacaaaaaaaattgaagaagccacaaataattggaaagatatccttgttcttggatcagaagaatcatattgcgaaaatgtccatactacccaaagcaatcaacagatttaatgtaacccctatcaaaattccaatgggatttttaactgaattagacaatctcaaaagtcgtatggaaccacaaaagaactgcaatagctaaagcaatcttcaacaagaacaaagctggaggcatcacacttcctgatttaacatgatactacaaagctatattaatgaaaacagtatggtactggcataaaaacagcacatagaataatggaatagaacagaaagctcagaaataaatccatgcatatacaattaactaatctttgaaaaggtgtcaataatatataatagggaaaggatactctcctacatatatagtgatggaaaaactggatatccacatggaaaaaaataaaactgcatcccgatcttacaccatatgcaaaatcaactccgaatagattaaagatgtaaatgtaagacctgaaaccacaaaacttggagaagaaagcaggtgaaaagctccgagacattggccttggcaatgatttttttgggggtattacctcaaaaacatatgccaaaaaagcaaaattaaacaagtgagactacattaaagtttttgcacagcaacacaacaataaacaaaatgaaaaggcaaaccacagaatgagagaaaatatttgcaaaccttatattcactaatgggttaatatgtaaagtctatagactccatagaacttaatagcaaaaaacagataacccagttcaaatatgggcaaaagacccgaatagacatttttcaaaaaagacatacaaatgaccaagaagtatatgaaaaggtgctcaacatcattaatcatcagagagctgcaaatcaaaactgcattgacatatcaccttacatcagtaagaatagccattaacaaaaagacaagagataatcagtgttggtaaactgtagagaaagggaacccttatacatggttggtaggaatgtgaattggtaaaagcataatggaatacaatatagatgttcttcaaaaaattaaaaacataactaccatatgatacagtaatcctacttctgggcatatataaaaaatgaaatcagtaaagaaatttctgtacccccatattaattgcagcactattcacaatggccaagatatagaaacaaagtaagtgtttattgattaatggatgaataaagacattgtgatacacacacatacacacacacacgaatattattcagacatgaaaaggaaggaaatactgccatttgtaacaacatggataaatctgaaggacattatgctaagtgaaataagacaaacacagaaataaaaatactgtatgatctcatttatatgtgtaatctataaagtggaattcagagaaacagaggtagaaacagtcagttgaattaacttaactttgacctgaggctgcctgtgtacctaagtaagtaggtaaacaaatcaaaacctaagttaggagtataactgttagctggggttcacccaatcacaagcagccagctcatcacaccatgcccaaataaggcaaatgcctagctgtagccaatcaggtgatttttcttcttctgtgtctggcacataaaggcttgctgtgcacactcctgggtggagctttctgaccctctcctggttctgagtgctgccaaatttgtaaattattttttgcttaaataaactcttctaaatttagtttgtctaaagttgatggaatttttttttttttttttttttttttttttttttttaggggttactaggagtcatggttaggggaaatggggagatgttggtaaaagtttaccaacttgcagttatagggtgaataagttctggaaacctaatgtacagtgtgaaaggaaaaataatctcaggtccccaaaatcactaagccaaagtgatttgggcttacaacaggatggcaactattggtatacttgaaatttactaagagaatagatcttaagtattctcaccacacacaaaaatattaactatgtgtcatagatatgttaattagcttgattgtggtaatcatttcacaatatatatgcattttaaaaatcatgttgtacaacttgaatgtatataattcttgtttgtcaattatgcttcaataaagctagggaaaaataaaatacttagaaataaatgtaataaaagaagtacgaaatttatactacaaaaaaaccgacaatatttttacagaaatcaaagaactaaataaataaaaagatgttctatttttatggatcagaagacaatattattaagatggcagtatatcaaaattggtctacaaattcaatgcagttctatcaaaatcccagctgactgctttgcagaaactgacaagatgatattaaaatttatatggaaattcagtgaactacaaaagttacaaaacttttgacaaagaacagagtttgaggaactatacttgctcatggcaaaagttactacaaagctgcaataatcaatacagagtgatactgacataaggatagacatacagatcaatagaatagagaggctagaaataaaagtttataattatggtcaattaaatttcaaaaatactgccaaggcaattcagtgggggaaagaaaaatcttttcgagaaattatacacaactcaatagcaataaaacaaataacctaattcaaaaatggacaaaggacctgaatagacatctttccaaagaagacatacaaatgaccaacaggtatatgagatggtgctgaacgtaactaatcagaaaaatgcaaatcaaaattgcaatgaagtgttacctcacacctgtcagaatagttattatcaaaaagataagaggtaataagtgttaatgagggtgtagaggaaagggaatccttatacatggttggtgggaatgtaaattggtataagcattatggaaaacagtatggtttttcctcaaaaaattaaaacgatctttccttaaaaaaattaaaaacagaactaccagtatatgatccagcagttttacttctgggcatgtatccaaggaaaatgaaatcagtatctcaaagaaatatttgcacccatatgtttatcacagcattatttcctggaaataacctgaatgtctgtcaactgatgaatggattaaacatatgttttactctattttatgctgctataacacaatatcacagactgggtaatctataacaaatagaaatgtattttctctcggttcaggaggctatgaatccaagatcaaggcactggctaatggtgagagccatcttgctgcatcatcacatggctgaaggtagaagggcaagtaaagtacagagaacacactcctggaagcccttttataaaggcattaaaaccacccccaagggtggaaccctcatggtccaatcacctctcaaaagtctcacctcctaataatgttacaatagcaattaaatttcaatatgcagctgggtgcagtggctcactcctgtaatcccagcactttgggaggctgaggtgggaggactgcttgagtccaggagttcaagaccagcctgggcaacatagtgagaccccatctctacaaatatatatatacttcaacccatgttgaaatataaatgggttgaaacaacatgggttttggaggggacaaaaattcaaaccatagcaatatggtgtgtatgtatacacacacacacaaaatggaataatagccacagaaaaaggaagtactgacatttgcaacaacatggatgaacctggaggatattatattaaatgaaataagccagacacagaaagacaaatattatataacctcatatttgcaatctaaaacaagtgaaactcctagaaacagaggtagaacggtggttaccaggggcttgagtgggagaaatggggagatgttggtcaaagggtgcaaattctcagttatataatgaacaagttctagaaatctaatgttcagtatgggcagtaatggatttgttaatttggttgcaataataatcatacaatgtatatgtgtattaaattatcatgatgtatgccatgcacaactttgtcaattaaatgttttttaaatatgaaatggccaatggttaaaaaaaattgtgctgatgtaactgtatatccacctgcaaaagaatgaagtttgaccctacctcatatcatatacataaatgacttaacatggaccaaagacctaaatgttagtgctaaaactataaaacttacaaacaaaaatgtatgcaaaaaccttcatgacctcggattaagcagtgttttttaaatatgacaccaaaacacaagtaacaataaaccaaacagataaattctatctcaacaaagtttaaaactctgtgttccaaagaatacaatcaaaaaagtaaaaataccaccctcaggctaggagaaagtatatataaatcttatatgtgagaaagaattagtatatagaacacacaaactcttacaagtcaaaaattaaaagacaaataatacaagtaaaaaatgaacaaagggctgaatagatacttctccacaggagatagaaagatggctaataagaatatgaaaagatgcttggcactattaatcatcagggaaatgcaaattaaaagcacagtgatatacccctgcacggtcactggaatagctagaataaataagacagatatcaataagcagtggtgaggatgtggagaaattggaattcttgcacactgctggtaagaatgtaaaatggtgcagcctcttaaagaatagtctggcagttcctcaaagtttgaatgtagaatgagtatttgacccagcaattccattcccaggtatatacccaagagaaatgaaaacatgtccatgcaaaaatttgtacataatggtcaagcagcattattctcaatggctgaagagtggaaacaatacagatgcccaggaacaaatgaatgaataagatatggtcaatctatggaacggaatatttggccataaaaagaaatgcagtactaataaatgctgcaatgtggatgaaccttgaaaacattatgctatgtgaaagacgccagtcacaaaagaccatccattatattatttcatttatatgaaatgtctataagaaataaatttgtagagagaaagtagattagtggttgcctaggactgaggaaatgttggagggaaaaatggggatgactgcctgagaataaatatacatgggtgatgaaaatgttctaaaaatagttttggagtgatgaacatgttctacaattgattgtggtgatggttgcactataaatatgctaaaaaccattgagtttaaatggttgaataatatatgaattttatcttaatgaaactgttctaatgaaaaatgatggctcacatgaaataaaatcgatgtgccagagctgccatggcagattgtggagaaagagaccaaaaggctcagagcagtgagcatgctggcatagatagatacactctataaaactggatcatgcactgggtgactgtttatttggaagggcccaaaggaaactctgtttatcaggcagcaagtcatgggcaggtgaacggggtattaacctaattttgtcctttgtgggctggagctgactctatgagatgatattggagaacttggtgccctagcaacaataggacagtaggattccagaaagctagaggccagctggcagcaaggcagaatcaaaatggacaaaatccccaaaatagtgagtaatgttagaatggaagccaggaaatcctgactgcaagggatttagggaaattattaagactatggtgtttctagttgggcagcctataagactgttgtttaatattagaatcaatagatgaaaaatagatgagctgaagtctgagattaatttctccaatagaagtttaaaatcccttgcccagtttccagacctgagccagtgcttagatccagaatccattcattgaaggagagtcacgtcccctgatgaagtatctgcaacaccataagtgtgtacagtagacactttctacacccttccctaaagggatcaatggccatttactcaggtatcaagacactgataaaggggaatgtccagatattttcaggtctattggatacagggtccaatttcacactgatacctggggaaccaaagcaccctcatggacttctattagaggagagccacacagggaactgaaaataatttcctgtctcaggtccacccgtatctccgtggattctctgtgtccacacatctgcttggtggttatttttctggtttccaaatatgtaattgatggatttattttgtacattagttatttcactcacactttagtcatttcacctgtggaataaaggatttgtagtaagaaaggccaagtggatgcccctaagagagcttctaatatcgaccaagatagaaattttaaaacaatgtagtatttgaggggcaatgaaataaactgtcactcaaagacataaaagatgcaggggttgtggtttcatcatcaactattgaatttaccactccagttctagcaaaaattggatggatgataacagatgacagtggattaatgaaaatgtaacctataattagccccaacttcagcagctgtgctgaatgtgatatgtttaaaaaaaaaagatttattgtttttgtatattatataatgccattgatctgcctaaatgcattcttttaaatacctataaaaaggagggccagaagcgagttttattcacagaggacaaataataatacattttaaaaaatattttatttttgattttcaatttttgtgggtacataatagctgcatatatttatggggtacatgagatgttttgatacaggtatgcaatgtgaaataagcacatcatggagaatggggtatccattccctcaagcatttatcctttgagttacaaaccattcaattacactatttttaaatgtgcattattgactatagtccccctattgtgctatcaaatagtaggtcttattcttctaaatttttttttaccgattaaacatccccaccttcccttcagccccccactaccattcctagcctctggtaaccattcttctactctttatgtccattagttcaattgttttgaatttaggtcccacaaataagtgagaacatgccatgtttgcctttctgtgcctggcttatttcatttaacataatgatctccacttccatccatgctgttgcaaatgactggatctcattcctttttatggctgaatagtacttcattgtgtatacataccaaattttccttatccattcatctgctgttagacatttaggttgcttccaaatcttagctattgtaaacagtgttgtaaaaaacataggagtgcagatatctcttccatatactgattttcttttttgagacagggtcacactttgtcacccaggctggagtgcagtggcatgatcttggctcactgcaacctccacctcctaggttcaagtgatcctacctcagcctccacagtagctaggactataggtgtgaaccactacaactgcctaattttttttttgtattttgtagaaatcaggttttgccatgttgctcgggctggtcttgaacttctgggctcaagtgatctgccctcctcggcctcccatagtgctgggattacaggtgtgagccaccatgcaaaacgctggttttgtcttttgtggggtatatacccagcagtaggattgttgcatcatatcgcaactcaatttttagttttctgaggaacctctaaactgttatccatagtggttgtactaatttacattcccatcaacagtgtacgagggttcccttttatccacatcctcaccagcatttgttattgcctgtcttttggatataagccattttaactggggtgagattatatctcattgcagttttgatttgcatttctctgaggatcaataatcatcagcaccttttcatatgcctgtttgtcatttttatgtcctttcttttttttctttttcttttttttgagacaatgtctctcactctgtcgcccaggctggagtgcattggtgcaattatgattcactgcaggctcaagtgatcctcccatctcagcttcctaagtagctgggactacaggtgtgcaccaccactcccagctattttttatttttgtattttgcagaattggggtttgaccatattgctcagtctggtctcaaacttctgggctcaattccatctgccttggcctcctaaagtgctaggattagaggcataagccactgtacctggctttgtatgtcttcttcctttttcttttttttttttttttttttttttttgtgagacggagtctcactttgttgcccaggctggagtgcagtggtgtgatctcggcttactgcaacctctgtctcccaggtttaagcgattctcctgcctcagcctcctgagtagctgggattacaggtgtgcgccaccatgcctggcttatttttgtatttttagtagagacggagtttcacaatgttggtcaggctggtctcgaactcctgacctcaagtgatccacccgcctgggcctcccaaagtgctgggattacaggcatgagccaccacgcatggcctgtatgtcttcttttgagaaatgtctattcaaatcttttgcccatttttttacttagacttttagaattttttttttttttttttttactatagagttgtttgagcttcttatatactctggttattatttctttgtcagatgggtagtttgcaaatattttctcccattctgtgggttgtctctttattgattgtatcctttgctttgtagaagcttttaaacttgatgtgatactatttgtccagttttattttggttgcctgtgcttgtggggtattgctcaagaaatttttggccagactactgtcctggaggttttccccaatgttttcttatagtagtttcatgtttgaggtcttagatttaagtctttattacattttgaatttattttttattttttgagatggagtcttgctctgtcgccaggctggagtgcagtggcacaatctcagctcactgcaacctccacctcctgggttcaagcgattctcctgccccagcctcctgagtagctaggactgcaggcacatgccatcacgcccagctaatttttgtatttttagtgggtgggggggggtgagtttcaccatgttggtcaggatggtctcaatctcttcacctcgtgatacgcctgcctcagcctcccaaagtgctgagattacaggtgtaagccaccatgcctagccttgatttgacttttgtctacagtgagaggtaggggtctagtttcattcttctgcatatggatatccagttttcccagcaccatttcattgaagagactgtcttttcttttctccagtataagtacttggcaactctgtcaaaaatgagttccctgtgagtgtgtggatttgtttctaggttctctattctgttctgttggactatgtgtctgtttttatgtcagtaccatgctgttttggtgattatagctctgtagcataatttgaagtcaggtaatgtgattcctccagttttgatctttttgcttaatataattttggctattctgggcattctgtgttttcatataaattttgggatttttttttctatttctctgaagactattattggtattttgatagggattgcattaaatctgtagattgctttgggtagtatggacattttaacaatattgattcttccaatccataaagatggaattttttccattttttttgtgtcctcttcaatttctttcatcaatgttttataattctcctcatagatatcttgcacatttttggttaattcctaggtatttaattttatgtgtggctactgtaaatgaaattaccttcttaaatttaaaatttttcaaattgttcactgttgacatatagaaatgctactggtttttatatgttgattttgtgtcctgcaactttactgaatttattgattctaatagttttcctgtggagcctttaggttttttccaaatataagttcatatcatctgcaaactagggtaatttaacttctccctttccagtttggatggcctttatatcttctcttgtctgatcgctctagctagaacatccagtactttgttgaataacagtggtgacagtgaacatccctgttgtgttccagatcttataggaaagtctttcactttttccccattcagtatgatactagctgtgggtctgtcatatctggctattacgttgaggtatatttcttttatacagttttttgagggtttttatcatgaagggatgttggattttataaactactttttcagcatcaatagaaataatcatatggttttaatcattctttttgatatgatgtattacattgattgatttgcatgtgttgaaccatccttgcattccagggataaatcccacttggtcatgataaatgattttttttttaatggagtctcactctgtcaccaaggctggagtgcagtgccacaatctcagctcactgcaacctccacctcctgggttcaagtgattctcctgcctcagtctcctgagtagctgggattacaggcatgcaccaccacactcggctaattttgtattttcagtagagacgaggtttcaccatgttggtcaggctggtcttgaactcctgacctcaggtgatctgcccacctcggcctcccaaagtgctgggattagaggcttaagccactgcacccgaccctgatgaatgatctttttaatgtattgttgaatttagtttgctaatattttgctgaggattctggcatcaatattcatcagagaaattggccagcagttttctttttttgatgtgtctttgtctggttttggtatcagggtgatactggtctcctagaatgactttggaaatattctctcctcctctatttttcaatagcttgagtgggattggtattagttcttctttaaatgtttggtagaattcaacagtgaagccatcgggtccttggttttctttagtgggagactttttattatggcttcaaccttgttacttgttattagtctgttcaggttttggatttcttcctggtccagtctcagtaggttgtatgtgtctaggaattgtcaatttcttctagattttccaatttattggcatagagttgctcatagtagcccctaatgatcctttgaatttctgcagtgtcagttgtaatgtctttttcatttctgatttgtatcttgtctcttttttctcagtcttgctaaaggcttgtcagttttgtttaacttttgaaaaaaagcaactttttgtttcattgttcttttgcattgatttttatttcaattttatttatttatgctctaatttttattatttgttttcttctaattttgtgtttgttttgctcttgcttttctggttaaggttcattgttaaattgcttatttgaagtttttcctcttttttcatgtaggcacttatagctatcaatttgcctcttagtactgcttttgccgtatcccataggttttggtatgttgtgtttcctttatcatttgtttcaagaaattgttcaatttccttcttaatttcttcattgactcaatggtcattcaggagcatattgtttaattttcatgtatttgtagtttcaaaaattcctcttgttattagtttctagttgtattccactgtggtcagagaagatgcttgatggtattcaacttttttaatgttttaagacttgtgacctaacatatggtctatccttgagaatgatacatgtgctaaaaaagaatgtgtattctgcagccattggataaaatgttctgcaagtatgtattagatccatttgatctacagtgcagattaagtctgatgtttcttttttattttctgtctggaagatctgtccagtgctgaaaatgtggtgttgaagtctccagctattattgtattggggtcactctctctctttagctctaatcgtatttgctttatatatctgggtgctgcagtgttgagtgcatatatatttatatttgttatatcctcttgctgaattgaaccctgtattagtctattcttgcactgctataaagaaatacccgagactgggtaatatatagagaaaagaggtttaattggctcacagttctgcaggctgtacaggaagcatggctggggaggcctcagaacacttacaatcatgacaaaaggtgaaggggaggcaagcctgtcttacatggctggagcaggaggaaagtgggaggaggtggcacacacttttaaacaatcagatctcacaataactcactcactgtcatgagaacagcacccagggggatggtgttaaaccatgagaaaccacccccattatccaatcctcttccaccaggctcaacctccaaaatttaggattacaattgaacatgagattttggtggggatgcagatccaaatcatattattccacctctggtgtctcccaaatctcatgtccttctcatactgcaaaatacagttatatcttcccaacagtccctcaaagtcttaactcattccagcattaattcaaaagtccaaagtccagagtctcaacctgagacaaggcaagtctctcccacctgtgagcttacaaaataaaaaaacagttagttacttccaacatacagtgggggtacaggaattgggtaaacactcccattccaaaagtgagaaattggccaaaagaaaggggctactggacccatgcaagtctgaaacccagcaggtagtcattaaatcttaaagctccaaaatactctcctttgactccatatctcacatccagggcacactggtgcaaggggtgggctcccaaggccttgggcagctcagcccctgggactttgcagggtaagccactgtcactgctttcacgggctggcattgactgcctgtggcttttccagttgtacagtgcaagctgtcattggcagatctatcatcctggaatctggaggacagtggctgtcttctcacagctccactaggcagtacaccagaggggaagctgtgtgggaactccaaccccaaatttcccctccacactaccctagtagaggttctccatgagggctctgtccctgcagctggcttctgcctggacatccaggctttcccacacatactctgaaatctagttggaggctcccaagcctcaattcttgcactctgtgcacctacaggcttaatttaacaccacacgggagccactaaggcttataacttgcatcctatggagcagcagcctgagctatacctggggccctttgagctgaagctggagctggagcagctgggatttggagagcagtttcctgaggttgtgcagggcagcaggaccctgagcctggcccaggaaaccatccttccctcctaggcctttgggcctgtgatgggagaggctgcccccaaggtatctgaaatgccttcaaggtgtttttcccactatcttggctatcaacattttgctccttgttacttgcaattttctgcagctagcttgaattcctctccagaaaatggtttttttcttttctacaacatggccaggctgcaaattctccaaacttttacactctgcttcctttttaaatataagttccagtttcttgtcatgtctttgctcacaaatatgagcacagactaccagaagcagccaggccacgtcttgaacgctttgctgcttagaaatttcttctgccagataccctaaatcttcgctctcaagttcaaagttccacagattcctagggcaggggcacaatgtctccaaccacaatgtcctaacaaaagtgaccttcactccaggtcccaataagtccctcatctccatctgagacctcctcagcctggacttcattgtccatatcactatcagtattttggtcaaaacaatttaacaaatctctaagaaattccaaacttcccctcatcttcctatcttcggagccctccacactcttccaacctctgtctatttcccagttccactgctgtttccacattttcaggtatctttctagcaatgcctcactcctctttaccaattttctgtattattctgttctcacactgctataaagaaatacccaagacttgttaatttatgaagaaaagaggttgaattggctcatagttccacaggctgttcaggaagcatagcggcatctgattctgggaaggcctgagggagcttttactcatggaataatgcaaagtgggagcaagcatctacatagcaggagtagaccaaggcaagcgggtggtgtggagaggtgctacacacttttaagcaaccagatttcagaagaactcactatcatgagaacagcactaagaagatggtgctgaattagtcatgaaagatccacccccatgatctaatcacgtcccaccaggccccacctccaacattgaggattacaatagaacacgaaatttgggtggggcacaaatggaaaccatattaacccctttatcattgtatagtgactttatttgtctcatagtttttgtatcaaaatcaatactccttctctttttcctggtttccattggcatggaataactctttccaactctttactttcagcctatgtgtgtctttatagtttaagtgtgtttcttgtaggcaacagatcaatgggtcttgttttctccattcattcagccagtctatgtcttttgattggagagtttagtccatatttccattcaatgtattatcgataagtaaagacttactcctgccttgttatttatttgttttctggttgttttgtggtcttcttctttcttttcttcctgtcttcctttagggaaggtagtttgctctggtgatatgatttaggtttttgctttttattttttatgtatccagtgtatgtttttaggtttgaggttaccataaggattacaaatactattttgtaacccattattttaacctggtaacactgtttgcattaacaaacaaaaaactaataaaaactctacatcttaacttcatccccccactttttaactttttgttgtttctaattttatcttatttttctgactggtcttgaaaagttgtagttactatttttgattggtttatcatttattctttctacttacacaccacagttacaatgttatcacactttgggtttttctgtgtacttactcttaacagtgagttttttacctttagatgattctttgttgctcattaatgtctgtttctttctgaccaaagtactcccttaagcgtttcttatgggaccagtctagtgttgatgaaatccctcagcttttgtttgtctggggaagtctttgtttattcttcatgtttgaaggatatttttgctggatatactattctagggtaaaaggttttttcccttcagcactttaacatatgtcatgtcactctctcctggcttgtaaggtttccactgaaaaatatactgccagatgtattggagctccattgtatgttatctgtttcttttctcttgctgcttttaggatcctttctttacccttgtcctgtgggagtttgattattaaatgccttgaggtaatctttgggttaaattggcctggtgttctataaccttcttgtacttggatataaatatctttctgtaggtttaggaagttctatgttattatccctttcaacaaactttctattcctatctctttctctatctcttctttaaggccaataactcctagatttgcccttaagaagttattttctagatcctgtgggcatgcatcattgttttttattttttgtctcctctgaatgtgtatttttctttctttctttttttttttttttttttttgagatggagtcttgctccttcaccaggctagagtgcaatggtgtgatctcggctcactgcaacctctgcctcctgggttcaagcaattctcctgccttggcctcccaagtagctgggattacaggcatgagccaccacacctggctaattttgtatttttagtagagatggggtctctccatgttggtcaggctggtctcaaactgccgacctcaggtgatccgcctacctcagcctcccaaagtgctgggattacagtcgtgaggtgagccactgtgcccagctttgttactgttaatagtgctgcaatgaacatacacttgcatgtgtctttatggtggaatgatttatattcctttaggtaaatatccagtaatgggattggtgagtcaaatggtagttctgtttttagctctctgaggaatcaccacactgctgtccacagtgattgaactaatttacactcctaacaagtgtataagttccttttctccataacctcaccaacatctattatttttttacttttttgtagccatcctgactggcagatgatatctcatcatggttttgattttgcatttctctaatgatcagtgataattgaggttttctttaacacgctagttggctgtatgtatgtcttttttgaaaagtgtctgttcatgtcctttgcccattttttaatggagtgggttttttttttcctgtaactgtgtttaaattccttatagatgctagatattagccccttgtcagatgcatagtttgcaaaaattttctgtcatttggtagattgtctgccctgttgtttattttgctatgaaaaagctcttaaatccaatttgtccatttttgcttttgttacaattgcttttggtgtcttcatcatgaaatatttgccagttcctatgtccagaatggtattgcctaagttatcttcaggatttttataattttgggttttaactctttaaaccatcttaatttttgtacatagtaaaaggggtccagttacgatcttctgcatatggccagccagttatcccagcaccatttattgaatagggagacctttccccattgcttgtttttgtcaactttgttgaagatcagatggctgtaggtttgtggccttatttttgggctctctattctgtcc

(The sequence listing continues in the following parts.)
